United States Patent Application Publication US 2020/0377945 A1 - sequence listing, part 9

SEQ ID NO: 1490 - DNA, 18525 bp, Unknown
  gut microbiota DNA sequence
catttattcccgaataaattgcagacactccctatatagtagtataataacaataattaatacacctaatttcacaaacaggaattggcgataagcatgaaaagaggtttacactatggacgtaagaaaaatgagaaacgaattactgggaaagcgccttgtggctgcgcttgagtcgcgcaacatggaagcctattatgtagagacaaaggaggaggctgttaagaaggcactggagctgattccaaagggcagctcaatcaatatgggcggtgccacatcggtgaaggagtgtggtctgtatgaggcgctctcaaacggagaatatcagttttatgacagggacaaggtgtctacgcaggaggagaagcaggagatagcgttaaaggcatttacatcggattatttccttggaagtgtcaatgcgatgagtgaggatggcgtatttatcaatattgacggaaatgcaaaccgcgtggcggcatatgcttacggaccgaagcatgtgcttcttatagtaggcatgaacaaggtcgtaaagaccgaggcagatgctatgagccgtgcgagaaatgaggcagcgccaatcaacgcacagcgctttggcatcgacacaccatgctctaagaatggcacctgctttgactgcaagagcccgcagtgtatctgctgtcagattcttaccacacgcttttcaagggtgaagggacgtttccagattattcttgtggatgagaatctgggcttttagtaactgttcagtacagaaatatgcggtaccgcatatttcgtaagaaaacgtatattatgtaggagcaagcgcccatcagcgcagctgattcttatgcgcttgcggctcgcaactgtgaagatactgaacagttacgacttttaatatattgaccctcatatcatttttacgcattatacggacaggaaatatacgcaaaaaatatacggataagaaacatacaaaaaggaatataagaaaatgggatatttaatcagtgagacaacaaaagaggagcgcgaggcaattgtggctgagtcgcttggcaatatcgaggctacctgcgatggctgcatgtcgggacttgccgagatgtatcaggactatatcgacggaaagaaggagcttcgtgagataaatatggagttcaatgccaggtatgtgcatggtgaggatatgccggggcgaagcggctgcggatataaataaaaaacgtgcaacccttttgggctgcacgttttttattatcctaaaagtgccttatcagaagcaaattcctcgccggaaacctcctcaaacttcatgagcagatcctccacagtgaggtttttcttttcctcgcctgagatattaagaacaacctgtccgttattcatcatgatgagtctgttgccgtgagcgatggcatcacgcatgttgtgtgtgaccatcatggctgtcaggctgttctccttgatgattttgtctgtgagagtgagcacctttgcggctgtcttcgggtcgagagcggcggtgtgctcatccaaaagcagcaccttcggcttctggagtgaagccatgagcagtgtaacagcctgacgctgtccacctgagagcagaccaacctttgaggtcattcgatcctcgagtcccaggtcaagctcctttaaaagctcgtggaattgctccttttcagcctttgtaataccccagccaagaccacggcgctttccgcggcgagcggcaagtgcgaggttttcatcaatctgcatggttgcggtagttcctgtcattggatcctggaacacacgtcccagaaatgatgcacgcttgaactcagggagccccgtgacatccactccatcgatgagaattgaaccatcgtcaacaggccatgtgcctgcaacggcattgagcatggtcgattttccggcaccgtttccgccgataacagtgacgaaatcgccctcctcaagctttagatttacaccattaagggcatgcttttcattgattgtgcccggattgaaggttttatgtacgtttctaatctctagcatttatttgccctcctttgtgttaagtgctgcggcagagcgtttgccggcctttttaaaggaggccttgctcttgcccttcaggtaaggcactgcaaggaaaattgccacgatgattgcagtgaagagctttaagtcatcacttggcatctgcagccacagaacaattccgattacaatgtagtaaacaattccaccaaatatgacaaagataagctttcccatgaaattcatgtgctttccgaggattgcatcgccgagcacctcaccgatgataacggcggcaagaccgatgacgattccaccacggcccatgtttacatcggaaaagcctgagtactgtgaaagcaggccgcctgagagtgctacaattgcatttgaaagcgcaagaccaatgagcttcatgttgtcgatgttgataccctgagccttgctcattgcagggttgcagcctgtggcacggatagcagaaccctgctctgttccgaaataccagtaaagcaccgcgataattacaaccgagaaaatcacaccgacaattatcgcatgtgtcagattacgtgatgaaagcaccagattatatttatctgcgctaagtgcctggttggcgtggcgctgcatgatatttaagttgatagagtagagagctatctgtgtaaggattcctgccagaatcggaggaatgccgagctttgtatgtaagagaccggtgcagagtcctgcgagcagaccggcaatacatgcgcaaagcagtgaaacccagatattgtagccgttaatcgtcatcataacggttacggcaccacctgttgcaaatgagccatcaaccgtcagatcggcgaagtccaacagtctgaaggtgatataaacaccgagtgccatgataccccaaatcagaccctgggctatattgcccggaagggcattggtgaatgcaactggatttaaggttgcaaaataattcattagaatcattttattaaatacctccatagtgcagctgtttattcagctgagatttcctcatagccgtccggaactgtaattccaagctccttggcgcggtccggaaggtactccttagtgaacttaggagcgctcttgacctccatagttttgatgtctgtaccatttacaaggatatcgtaagccatctcacctgttgtgtatccaaggtcatagtagctgatagaaagtgttgccacaccacagcccttagcgattccttcctcgccggcgaagataggtttcttagcctgtgaagctacattgttgatagcctctgtacatgaagcagcagtgttgtcagtcgggatgtagattgcatcagatgcatcacatgcgctctgtgttactgcagcaacatcatttgaatcagagaatgtgtactcttttacagtgtatccctcgtcctcaaggtatttggtaatagttgttgactggtagatactgtttggttcagatgagcagtagatgataccgatgttctttgcatccgggaagagctccttgatgcatttagcctgctcatcgagtggagcgaggtctgtagtgcctgaaatattctttcctgtagtgcctgaccagtctgacatatcaagagctgtagcgtagtctgtgatagatgttccaagaattggaatagagtctgtagctgctgaagcggcctgaagagctgctgtagcatttccaaggataaggtcatagtcgttggtgacgaacttggtgcagattgtagagcatgtagaagcatctcctgcggcattctgctcgtcaaaggatacctggtctccgagcttgtcctttaatgcgtccttaaagccctttgtagcggcatcgagagcctcgtgctgtacgagctggcagatacctacctgatatttggcatctgagttcttacctgactgtgtgccaccgtttgctgaaccggaatctccgcatccggcaagtccaagaaccattgttccggcaagaacaagtgaagctaaaattttagatctctttttcatgataattcctccttttatcagcgctttaaagcgttgatgtatcaattaggtaaattatattcacttattaatgagaagtcaagagaagatgaggaaaaagtagggtttaatatatataaatgatggataataagccattctgtttcgctgggttaggggagctgttttaggaatttcagcagtttcagctacttttttatggatttttccggctgtttcgctgtggttagggagctgttttagaaatttcagcagtttcagctacttttttggagatttttccggctatttcgctgtggttaggggagctgttttagaaatttcagcggtttcagctacttttttccagaatttttccagtttttggactggattggggagctgttttagaagttttatggattacagctacccaaggcctgtcagctatcaacatatggctattgtacactatgctaatttagtgtggggatattatgctaaagaataaaaatgatggttcatactggatttgtggagagggtgttggcacagaacaaaaaactgtttcgggagaaacggagtatacagttacatgtagcagtaaatttgtgccatatgaatttcctgcaaatgaattttcaaaataaaatatggctgaatgtaaaaatccccggtagtaactaccggggattctatgtctattcagctacaaccttggcaaatttctttttaccacgtctgataatgagaccctcgcccttgaaatcgttgagagtgtattttgtagagatatcagttaccttctcatctgcaacggaaacaccgccctgctggatatttctgcggccgtctcctcttgaatcgcaaagtcctgcttttacgagaacagagatgatatcaagctctccgtcagggaagtcctcagctgtaacggtaactgtaggcatatttgtattgttggctccgcctgcgaaaagtgcatggcttgcctctttagcctttgcggcttcctcctcaccatgaacaagctttgtaagctcgaatgccaggatttccttagcttcgttgagctgtgcgccctcccagctttccatcttgtcaatttcctcgagaggaaggaaggtgagcattctgatacatttaagaacatcggcatcagaaacgtttctccagtactggaagaactcaaaaggtgttgtcttgttaggatcaagccatactgcacctgactgtgtcttgcccatcttcttgccctcagagtttaggagcagattgattgtcatagcgtatgcgtcttttccaagcttacgtctgataagctctgttccaccgagcatgttgctccactggtcgtctccaccgaactccatgttgcagccgtatttctggaaaagtgtgtagaaatcgtagctctgcatgatcatgtagttaaactcaaggaaggaaagacccttttccatacgctgcttgtagcactcagctgtaagcatacggtttactgagaaatgagcaccaacctcgcggagcacatccacgtagtttaagtccatcagccagtcagcattgtttaccatgatagcctttccctcgccaaagtcgatgaagcggctcatctgtttcttgaagcactctacgttgtggttgatagtctctgttgtcatcatctggcgcatatctgtacgtcctgatggatcaccgatctgtgcggtacctccaccgataagtacgataggcttgtttccggccatctgaagtctcttcataaggcaaagagccatgaaatgtccaacgtgaaggctgtctgctgtaggatcaaagccgatgtagaaggtagcctttccgttgtttataagctctttgatttctttttcgtctgttacctgcgcgatgaggccgcgggcaactaattcgtcataaattgtcatgattttcctcctgataagatgaatctgtattctgaaaaataaaatatccccctcatccatttaaggacgagggggatttctcgcgttaccaccttaatttgcatcctgctcgcacaggaatgcctcagtgagttgtcacacattattcgacatatattatatagtgaaaatagccgattctgctaacactccggcactataacgtgtgccaatacgttgcggcttattaatcgaaccggggatatttaatcatccggtatgacgttcggtgcaaagctccgggatgtattccaaatctgttttccttgcgcctctcaccttccggcagctctctgtaagtattgcagaaatgtacttgttcccatcaaagcctgttgaaatgtaattgtgcttcaattgacgatattatagccgtttaagaaggggtttgtcaagggctgtaaaaagcggtgattactttaacggtatatacaggtcggaagaactattgcaaaaaagtataaaaaagtataaaataaaagaaaaagtataaagatttataaaaaactataaagagcaatagaaagtataaaaaaatataaatagttttgaatttcatataataaattgaggtgaatttatgcagaatccatttactacaaccttcagtaagactccggaatacacatatatccatacagagaaaacagaggagatactggaaaactttatttacgataatccgtcggagtcggtatataagataaccggtgtcagaggctccggtaaaaccgttatacttgcaaaggtggaggaagaattaagaaccaatgaaagcagatatataaactggcttgtttttgatgtaaatcctgcaagagatatactgggacagatagcggcaatgcttgtaaaggccggttttggttcacaggataagaaaacaacagggataaacctctctgcaacagtgatgggaacaggtggtggaatcggctatacggcagaaaacaataataatttctttgatatcggtgtagaagttgagacaatgatacaggctgcacagaaaaaggggaagaagatacttataggaatagatgaggtttcaaagtccgaagagatgataaaatttgcgtctgaatatggcagatggctcagagcagggtatccggtttattttgtgtgtacaggcttgtatgaaaatatacaggaattgagcaatgtcaaaaatcttacatttttcagaagagcggcaacagttaaaacggagcctcttaatatgatacgaatgactgaaatgtataagagtaagctggatattgacagtaatgaggctcgtgaaatggcgaaaattacaaaaggatacgcatatgcatttcaggaattgggagtgttgtattttaagaaaaagttggatgagttgttagaagatattttaccaaaactcaaagctgaattgtttgcatattcttatgaaaaaatatgggaagagatgactgaaatggacaggtttcttgcaggacttttgacagaaaaggaagaatacaagcgtgaagaagtgcttaagcttatgggagagaagtcaggaagctactctatgtacagggatcgtcttataaaaagagggatattaaattccagacagggctatatctcacttgcacttccatattttggtgaatatataaaggagtattgttagaatcttaaaatgagtgaattatataagctccaaaaactttttaattattgcactctgacctgtggtgatgtatactttgaataacaaataaactttggttatgaaagggagaaaaaatgagcacatatagcacatattatactattatgagtatgattgacggctttaagtcgtttatcaatctggcagttatggtactgacaattgttgcatcatggattatgtatgcaaaggcaggagagcacggctgggcggccatcgtaccgttttacagctcatatgtaaaattcaggattgcagggaaacagaagctgttctggggatatcttgtggcaagtatcgcaagtatagcaggatgtattttattgatgtatgagattattgcctcaggactttccgttatgacatccagttatatggggtcgtattatgattctacctatggatatgccggaaaccgtatcggggctcacatgggcatgctgatatttgcggttattctgattattgcagcaatgattgcggcattggttatgaatatcctctgctgtgtcggactggcacatgcgtttggcaagggagcaggatttgcctgcggacttatattcctcaatgtgatttttatctgtattattgccttcaacaaaaacattgtttatgtgggagatggatataatagtaataataactactataatccatacggttcaaacggatacggtcagcagtatggtcagaacatgtacggaaacggagcaaatcagcagtacggtcagaacatgtacggaaacggagcaaatcagcagtacggccagaacatgtacggaaatggagcaaaccagcagtacggccagaacatgtacggaaatggggcaaaccagcagtacggtcagaacatgtacggaaatggcacaaatcagcagtacggccagaacatgtacggaaacggagcaaaccagcagtatggtcagaatccgtatggcacagcacagggcggggatgctcaaaattcctacggtacatcacaacagcagccatggaatgatgagtataacaacaaagattacgaataaataataagaataaagcacatgaataaaaactataaataaatgttatagtacaaatttgtatcattctcttgacatatagtgtcagagggctataatacaaaacaagatttaaataaatatgttcaccaaaattcgttgatgagaacaaggtccgatttgtatttattttcagagagcctgtgggcggtgcgaacaggcaatgatcagattggaatatcctctctaagaagcgggctgaaagcattaagtgtgtctgtaaacctcgccggtgtccaccgttatatggaaagcatatgctggtatgcagagtgtcacagtaatacactgtggaatcagggtggtaacgcggattatttcgtcccttttcagattattcaatctggaaagggattttttaattccataaaagagttttagtgagcagaaaaatgttaaggaggcttacaatgaaagcattacaaaaagtaagtaaatttttatcagactacacatcgatagttgtcatagcaatcgctgtagtcacatttctggttccgaatctgatggcctgggtaaatcagatgctgtttgtggatccggtatccaacaagttcacatgtcagtcaatcattataggaatcatcatgtttagtatgggacttacacttacgacacaggatttcaagatactcgcacagagaccatttgatatatgtgtaggtgcaatcgcacagtatcttatcatgccgtttctcgcatttggtatctcaaaggcattgaatctgcctgacggaatcgcacttggacttatcctcgtaggctgctgtcctggtggtgtttcttcaaacattatgtcatacctctgcggtggtgatgtggcattctcagttggaatgacaacagtttccacattgctctcaccatttatgacaccgcttctggtatcattgcttgcaagcggaacacatgtctcaatcaaggcgcttccgatgtttgtgtcaatcattgagactgtaatctttcctgtagcggttggatttttactcaactacctgcttggaaagaaaaaggcatttgccgaggctcagaaggtcatgccgggtattgcggtgcttggcctggcattcgttgtaggtggtgttgtatcatcacagggctcaaagttctttacatcaggagtagtaatttttgcggcagttctgttacataacggacttggatatctgcttggatacggtgcaggaaagctggtaggcatgaacacagccaagaagagaaccatctctatcgaggttggtatgcagaatgcaggtcttgccacaaaccttgctaccactacagcacagtttgcttcaacacctgaatcagccatcatctgtgcagtgtcatgtacatggcattcaatctcaggcacactgcttgccggagcctttgcattaaaggacaaaatggctgctaaaaaggcagaagaagccgctgagacaaagacagcataaagagaatgaatacctattataaccgattggtaaattaaacaaaaattatagaaataaaaaataaattatgtataaaatatttattgaaatttgctaaaaaaagagtaaacataatatataaataaaattaagataaacaaaagaaagaggtaataatatgagtggaatcttaatgatggtaatagccattgttgtgctcggtggagcatacttattatatggccgttatctgcaaaacaaatggggcattgatccaaatgccaagactcctgcctacgagatggaggacggagtggactatgtaccggctgataccaatgtagtattcggacatcagtttgcatctatagcaggtgcaggcccaataaacggaccaattcaggcagctattttcggatggcttccggttctgctttggatattaattggtggtgtattctttggagctgttcaggattttgcatctatgtacgcttcagttaagaacaagggtcgtacaatcggttacatcatcgaggagtacatcggtaaattaggaaagaaattattcctgttattctgctggctgttctgtatacttgttgttgcagccttcgctgatgtcgtagccggaaccttcaatggctttgctgctgataaagcaggtgaggttacaaaggttgtagccaacggagcagttgcaactacatcaatgcttttcatcatagaggcagttgcacttggcttcttccttaaatactctaagttcaacaaatggattaacacacttgttgcaatcgcattacttatagtagctatagtactgggactcaatttcccaatgtatttaaaccttagcgtatggcacataattatatttgcatatattcttatagccagtgttacacctgtatgggcactgcttcagccacgtgattaccttaacagctacctgttaatcttcatgatcgtaggtgcggtaatcggtgtatttgttgcaaatcctgcttgtaaccttgatgctttcacagcatttgcaatccctgatgcaaacggaaacccacagtatctgttcccaatcttattcgtaacaatcgcctgtggtgcagtttcaggtttccattcacttgtatcatcaggtactgcttctaagcagataaagaatgagaagaacatgcttcctgtttcattcggtgccatgcttatggagagtatgcttgcaatccttgcacttatcgcagtagcatcattcggtaagggagaggcagcagctcagggacttacaacacagccacagattttcgcaggagctatcgcaaacttcctgtcagtaatcggtttaccacactcacttgtgttcacactgattaaccttgctgtatcagccttcgctctgacatcacttgattcagtagccagagtcggacgtctgtcattccaggagttctggcttgattcagacacagatgatgacaatatgagtccatttgtcaagctgatgacaaacaaatactttgcaacaatcatcacactggtacttgcattcctgcttacaaaggtaggctatgcagagatatggccactgtttggttcagctaaccagctcttatcagtgcttgcacttgttgcctgcgcagtattcttaaagaagacaaagcgtcagggctgcatgctctggattccaatggtattcatgatggcagttacatttactgcacttggcatgacaatctacaagcttacaaaggcattattctctgtaggacttgaccttggaaattcattacagcttatatttgcagtattactgctcatccttggtgtacttgttgcaattcagggtgtgaagaagctctgtgagaaatcagaaagcaagaaagctgcagcttaaaatgagatagaagttgcaattaatagaaatcaaaagtctcagaatccgcttaataagcgagttctgggacttttttatgtgaggatgatgaataaaagaagtgaaaagggagcccgatatcaggctcccaattctctgtcctttcccatgaaaaatactgctaaagattccggaccaacatggcttccggtgcagaaatcataggtggtatttatcacatcgcgcacctttatgcgctttttaatctgttcaatcacatagagcgaatcctcatatgcgtcagcatgtgccactccgataatctgattttcagggtctgtaatgttgtcgcataacagattgacaagctcatttaatacggcttttcggccacgacattttctgaactgtacaatatatccgtccttgctgccccttaggataggcttgatgcttagcatgttgccaaccaaagcggtggttccgcttaatctgccggttcttgcgatatactttaaattgcccacggtaaacacaccgtttaatctggcaggataggtctctatcgtgtcagccacctcatcaaagctcatgcccttctcacgcatttcgctggcgtatattgcgagaagtccctgtccgagggaagcatttaatgaatccaccaggcgtatttttctgccgttactgcaatcatcaaggacagcatcggctgcgacacgggctgagttgtagttgccacttatgtttttactgagggagaaatacaggatatccttgtcagcctcaatgatttccctaaaagtatcctcaaagattccgctgctgataagtccggtctttacctcggcaccttctcttatcgcgtcatagtattccttaccctttgcccgctcctgttccggtgtgaggtcaggctcaaagcaggtcatttcctttccgttgacaaggtttacaaatgatagcaccttgattttatattttttacatagctctgcaggaatgtttgccgcagagtcaacaattatttcaaacatatttaccctcgtatttctataataatgatatgatggtcaaaaggtattttgcccctttaatcataataattggttaactgtagttatgcatcacatatcttgcaattatatgccattaatatatgtggttgcaaaggatagtatatgtagtttttgatactatgtcaatgacttttgccatgtttagtaaaaatttagaatatttagatagagttatcagggatgtagtgttatagtagaaataatagatatatagattcaatgaaacagaggaaaaatatgagtgatataaaattaggctgtcacgtaggcatggcaggaaaagatatgtttctggcatcagccagggaagcagcgtcatacggcgcgaatgtgtttatgctctacaccggggcaccacagaacacgagaagaaaggaaatctttgagctcaacatagacgcaggctgggaatatgcacatgagcatgggataaatgagatagtggtccacgcgccatacatcataaatctggcaaacaccgtaaagcctgagacatacgagctggcagtggagtttctggaaaaggagatagtaaggaccgcggcaatgaagagccgcatactggtgcttcatccgggaagtcatgtaaatgccggtgagcaggctggaatcgcacagattgtaaagggacttaacacagtactcaatcagaatgatgacgatgtgtttatcgcacttgagacgatggcaggaaagggcagtgaaataggccgttcctttgaggagcttaaggcaatctatgatggagtggacaggaaagaaagactgcgtgtctgcttcgatacgtgccatgtaaatgatgcaggatacgatattgtgaaccattatgatgatgtttttgcggagtttgacagggtgataggacttgagcagatagcggtatttcatgtgaatgacagcttaaatcctcttggagcacacaaggacaggcatgcaaatataggcaagggaaccatcggctatgacacactgcaccgcctggtgcatgatgagacctttgcaaatgtaccaaagattctggaaacaccatggctttgtgaggagggctctgcgaagaagactattcctccttataaagaggaaattgaatggcttcttaaataagaaggtggctaaaaatttatggagaggtttggtattacagacagtaagataatggaggcataacagatgaaggaaaaaacctacgagggaactaaaaaaacacagaatggtttaaagagaatgtttttttcagtgcttgcgatattattgcaggcagttttcatggtctatatgtttacaaggctaaatgaatatgcggcagcaataaacacgaccacaagcgtcctggcaatcatacttgtgctcggactgtacaatcgtgagcagaccgcatccatgactacaccgtggattatactgatactggcatttccgataatgggagtgtcactttacctgttagtcggactaaacggcgcaccgaataagatgcgtgcacggtttgaagaggtggattccatgcttcttccatgtctgcctgaaaacgcagacatactatccgatatgtatgaaaaggtgccacaggcagcgggaatttcaacatacctggcaaaaaatgcattatatccggtatatcagaacacggatgtgacatattatgatcaggcgtcaaagggactcgaagcgcagcttagcgatttatcaaaggccaggaaatttattttcatggagtatcacgccatagaggacaaggaatcgtggcaccgtatccagaaggtgctcacggagcgcgtgcaggcaggagtcgaggtaagggtgttttatgatgatatgggctcaatctttttcatagacagggatttctcggaaaagatggagaagcttggcatcaaatgcagggtgttcaacccggttgcacctgcctttaacatgtttttaaacaatcgtgaccatagaaaaatcacggtaattgatggaaaaatcgcatataccggcggctataatctggcaaatgagtacttcaacgtgacacacccatacggaatctggaaggatacgggaatcaggctcgagggagatgctgtcaagtcgtttaccatcgcatttctcgagatgtggaatgcatcagagcgcaaggtaccgcgcgaggtggatgtatcgcaatatctgctgcactatgattatgaggcaaaacagagtggatttatccagccatatgcagacagccctctcgataacgagcaggtgggggaggatgtctatatcagcatggcaaacaaggcacagcgttattgctggtttatcactccttaccttatcattacagatgagatgagccatgcgctgacacttgccgccaagcgtggagttgacgtgcgcatcatcacgccgggcatacctgataagaaaccaatatacagcgtgacacgctccttctacaaccagcttgtgaagcatggtgtgaggatttttgagtggacaccgggcttttgccatgcaaagatgagtgtggcagacgatataatggcaacctgcggtaccataaatcttgactacagaagcctttatcaccactttgaaaatggctgttttatggcggattgtgaagtggtgcatgaaatcagggatgattttataaggcttttcactgagtcagcggaggtgacggagaagtacaggaccggaagaagtgcaagacgaaggctgggacagtcaattatgcggctgtttgcagggctattgtagactgaaaataatgtgtatcagggaagtgagtgcatatgagtgattacgacagcaaaatcatcagaaagcagataagagtgtacggctcggtgcagggagtaggttttcgctacagaacagagcacgcggcagaaagcgttggtgcaacaggctgggtgagaaatgaccctgacggctcggtatttatggaaatacagggcacagaggagcagatagacagggtatttgcaatggtgagtcagggcacttatgtaaatatagagaaaatggatgccaaatcaataccggtggttgaggatgaacggggatttcatacgagagaatcgcttggagacttctggggactatggcacagataaacggaggcatcatatatgttttttatgatgggaataacggacggcaggaaggactttgacttcaatcaggtcattacctgcgataaatgtggcaggtatggcaggtatcaggtgtatatgacatacatggtgctgtcactgttcttcattccgtgttttaaatggaacaggcactactatgtgcagaccacatgctgtaatgcgctttacgagcttgatccggaaataggacgcaggatagcaagaggcgaggacgtggagatattgccacagcatttgcagcgtgtaaatccgcagtatggttatggctttgaaaatggaagtggaaacacaataaaaagatgcagcaattgtggatatacaactacagaggactttgaattctgtcccaaatgcggcaggaggctgtaatgtgtttcacgttctaatgataatatgcttttacgaatcgactgcaataaggcagaggatggagcatagaaagagtttaacaaaatcggtatttgacgatttggtggtaaaaattattcctcttcaacaagtttcacaaaatcatctggcagaattatctttgttccacctgcctgataatcttttatatttcttgttacaatataatccatatcttttctggatgccaccttttcaacaactgcatcctcatagtcactgattgcagatgcaagtgcatccatgcagtcatccgctgtaacctctaatattccagtcaatgaataaagctttcccattatcatctttgctgcatctatgttatgcaaatgtttccttataagataatagatgtctgttgctgaacttgcagtaatgtacatttcgattgtatgatttgctgccataagaaatatttcttctgcacttttattccatggctctcttgaagtcagggcatctattatcacatttgtatctgcaagaatcctcatctattttgcaccaagcctttcttcttttgcttcattcaggtctgcatcctttggtaagattccaaacagggattttgctacttctactctgtcctgatgtggatttgtcagttttgccactacttttccattctttgtgataaaaatatcttcttttgcagataataataaatattttccaagattatttttcaattcagttgctgtaattgacatatcaccacttcctttcttcgtactattattatactcattttgtacgattttatcaatgtatttagctggaaaatattactcggtgtactagttgtatcctccacattattatccgggggatatttgatgagcagctttttatgtgtttccccaaattcacaatgtgcattgaacgctcttgccattgacaaccctatggagtatgcccggttggtcttggataacgagatgcaggcttgggtggattaggaagatagtttagatatatggtaaatcaatcgtgaaaattttagatgaattaaggatgaatatgtggtagaataacccatatggtagccttgttcaagagactattaaatcgttatttgtagagagagatgattgttaaatgagaattgctgcgtatcagtttgctgtatctggaaatattagtgagaattataaagaaatagaaaaagcaatatatatcgcaaaaactgaaaaggttcagttgcttatatttccagaatgttcattaacagggtatcctccgagaaatatatctaatgcgtcatgtgttgattttaatcttgttcagataatgtgtgataaacttcaatcaatagctaacaaaaatgacatttcatttattattggaactatatttaaagaaaaagaaatatacaatagagcaatgttgtttcagcctaatagtcaaattgagttctatgataagcgtgccttgtggggatgggataaggataatttcacaaaaggcagtaataatggaatatttgaaatcgaagggataaaatttggaataagaatttgttttgaaatcagatttcctgaattctttcgagaactatacaaaagaaatacagatataaatctagttctattttatgatgtggcagatatagatgataacgaaagatataacatgattaaaggacacttacaaactcgagcagttgaaaatgttactaccactatttctgtaaatgctatttcaccatttcaaacggctccgacaatggtccttggaaaatcggggcagtgtataaaagaatgtgttagaaataaacctgaacttttgatttatgattttgaaaagacagagaatgatttcggtgaaaatggaaggatatcaatatctgatatgttgattgaat

SEQ ID NO: 1491 - DNA, 3287 bp, Unknown
  gut microbiota DNA sequence
ctccttttgtttttttatttttgctagtatgagagtatatgtcccatgcggttctgctttgttttcagataaaacaggtcatgcgctgtggcgctcatctggattggcactcgctcgctgatttccatgccaaactctgagagctggtataccttgtcagggttatttgtgagaaggcgcaggctgtgtacgccaagctctcttaatatctgggctccgatatagtactcgcgctcatctccggcaaagccgagtgccagatttgcttcgagtgtgtccattccctgctcctgaagctcatatgccttcagcttatttatcagaccgatgcctctgccctcctgacgcatatagagcagtattcctctgccctcctcgtctatctgtctcatggctgcctcaagctgctggccacagtcacagcgctgtgagccgaatacatctcctgtgagacactctgaatgtactcggcagagcacatttcttccatctgcgatttcgccctttacaagtgccacatgatgctctccgtttaatctgttgacgaagccatatgccttgaattctccgtatttggtcggcagctttacctctgtgacacggtcaacgagcttttcatgtatctttctgtattcctgaagtgccgctattgtgatgaatttgatgtcccatttttttgcaagctccatgagctctgttgtgcgcatcatggtaccgtcctcacgcattatctcacagcacagtccacattcctttagtcctgcgagcctgcataaatcgactgttgcctctgtgtgtccgtttctctccagtacgccgtttttctttgcaagaagcggaaacatgtggcccggacgtctgaaatcctcaggctttgcgtcatcagagacacatttcattgcggtgattgagcgctctgctgcggaaattcctgtggttgttgagacatggtctattgatactgtaaatgctgtctcatgattgtctgtattttcctgcaccatctgcggaaaacgaagcttctttacatattcctgcgacatcggcatgcatatcagacccttgccgtgcatcgccataaagttgatgttttctgttgtggcaaattctgccgcacagatgaaatcgccctcattctctctgtcctcatcatctgtgacaagtattatttttcctgcacgaagctcatcaaatgcttcttctactgtgttgaatttcatattttatgtcctttctcttatgattttgaagctgttcaattacataatttttaaccattcagccccacgcacattcgcaaacccgcacgatacccgtgcttttatgttaaaagccgtattttgccaggaaatctcttgttattccatccggttgtttttcgccggatttgtgcagtgcattttccttaattgtctgtgctcctgtcatttcttctgttattccttccgactgccctttaaacaacagcttctcaacatattttcctatgatatctgtttccagatttacgacagctcccatctttctgtcctttagaacagtctggcttaccgtgtgcggtatcgctgatatcgagaaattatcctctgccacctttgcgactgttaggcttattccatcgattgtgacggagcccttctcgactatatagcgcatgagctgtggtgtggcctgtattgtataccagatggcattgtcatcctttttgacctccacaatcctgcctgttccgtcaacatgtcccgacacgatgtgcccgccgaatctgccatctgctgccatcgcacgctccaaattgacatgtgctcctctcatcgcatttgcaagcgatgaacggtttagcgtctcgtgcatgacatccgctgtaaacgcatgtggcatgagccttgtgactgtgaggcagataccgtttaccgctatgctgtctccgacctttgttccatcgagcgctttttcagctctgattgtaagtactgctgagtttgctccacgtgaaattgtatctattattccaacttcttcaactattcctgtgaacattgtgtatcgcctttcttttttaagtattcacaacatcactctcgatgaggaaatcatcaccaagctttgttaccttactgtttccaagcatcacggcatgtgccggcgagtcggctcccattccctctatcggagtttttgcatccgcccctccgaaaagctttggtgcaatgtaagcgtataccttattcacaatcccgctcttaagggctgaccagttgagtattccgcctccctcaagcaaaatgctgtctatgcttctttcgccgagcttttgcatgaggtcatttaaatcaatatgaccgtttttttcagctacatacagaatttctattccgttttcttcaagccgtgttatttttctgtttttttgataattattgttttcttctatactatctttttcagtatcaggcaaggcttctgaatgtgcggtttcacgatatcgctcactgactgcaactatcgtcggcacttcctttgcagtatttactatctgcgattccagttgaagcttaaggtgcgtatcgcatattatgcggattggatttactccgccctcgattctacatgtaagcagcggatcgtctgcgagcacggttcctattcctgccattatggctttatatctgtggcgcaggttttgcacatgttctctcgctttttctcctgttatccactttgaaagtcctgaatgtgtggctatctttccgtccatcgtcatggcatatttcatagcgacgtatggacgtctggtctgtataaagtaaaagaatacctcgttcagcctgtcgcactcgtctttaagcacctgcgtgacaacctctatcccatgctctttaaggattttgataccgcccccggcgacaagcggattcgggtcatccgagcccacatatactctttttatcccggcttctatcactgcctccacacatggcggctgcttgccatgatgacagcatggctcgagagtcacatacatttccgctccctgtggcgattccttgcaatgctttaacgcatttctttccgcatgcagctctccgtatctctcatgccagccctctccgattatcctgccgtcctttacaatcacagctccgaccatcgggtttggcgaggtataccccatgccgcgctttgcaagctcaatcgcccttctcatatattgttcatcagtcatttggtttcctttctgcatattctttatatgcccactaaaaaagccccaaactattaatgtt

SEQ ID NO: 1492 - DNA, 14557 bp, Unknown
  gut microbiota DNA sequence
tgacgagtttttagttgaaaggaatcacaaacacccatgaagtttattaaaattcctgcatttgcaatagtcctcctattgctcatgcaaatagtatcaaaggtatttattgccattgacagcagcgatatcgaaaatatatatggtttttatgcagagccaaaaaacagcctggatatggtcatgattggaccaagtgaggtatacactggctatgcaccggctctggcgtgggaggagtatggtcttaagtcctgcaatctttcaataggagctgtgccatgcaatatgtacaagtccattgttacagagattgtgaagagacagaagccgaagcttcttataatcaatgctgcagcatttagtcatggcaactggaatctgacggatgaggtctttctgagaaagtggattgataatatacctatgtcgcagaacaagcttgacacggtaaagactattccaaaaaatatcaataaggatgatgaaaaggtgaaggataacatatcggataccctttatttcccattggagaaatatcatggcaactggaaggaacctgatgcagtgtacacctcatttgtcacacgtacctatatgaggctcagcggtggaggctatctgaagggctttttttcaaagacaggtattaccggaggcagggacaatctggcaaatatcggacagcccacaaaagaagcctatgtgctgacggatgagtgcagggcataccttaaggaactgcttgcgtactgcaataagcttggcatagagcatgtgctgttgttgcagccacctcatgagacggaggctgctgataagtcagggcttgagcagattgaaagtataacgaaggagtatggatacgattttcttgatctgagtacggattatgagagcattgcagggatagatgattcccatgatttcgcagattttgagcatctgaatgcctatggcgcccaaaagctttcgtcatatattggcaatctggctgtaaaccaatatgggataaagtctgttacgtcagattcagagctttcaagatgggaaaagtccgtgaagaggacgaaaaaagctctgaaaatggcaagagaatatactgacagaggagaggcgcaggtggttggagagtatgaggctgccaaataagtgaagctgccgggaaatcaagcgttgcagaatggtaactagtcagtggcgtttgatccgggctttaatgagatttatgccttcccaaaccatcttatcacgcatcagtacaagcagtaccatatagactataaatccggtcacaatcataatcattgtgtgcatgaagctgactgacagctttgcatccatgagcagcagtacgataagcatacagactgctgatacaagatatttccacgataaagaaaatatttttggtatacttagctcatttcgtatgaagtaaagctgcacggcagttattattacctccgagatgacagatgctatggctgcaccgtatgaatagagctgaggtatgagaatcatattcatgacaaaattggctacggctccgatacatactgagcgtgtcagcaggccttcacgcttggtagttaccagatactgtataccgattacattgcttaaacctataatcggcaacagtgtagccattatcatgatgaggtatggcaccttttcatatccaggcccgaaaaaccatggcgagaaattgcgtgcgatgcctatcagaccaaagtacagggcaagccctataaaccagacgaattgaaagctcttataaaggagggtttttacttcgtcttttttattttcactgaaggctcttcctattcttggaagcatcactgtgcctagtgaggttacgagcatgaggaccattttggatatcttattggcttgctcatagtagccgttttctgtcatgctgccggttatgttgttgagcatagttttgtcaagcgctgtgtatatggttgtagctattgtaggaacaaagagggtgagtgtggctcttaggtggcagaaaggcctaagctccctgagctttggtctgtcaacatattgaggcaggtaaaaccagatggatatattggcaaaaagctctaatagacatactcctgccacatatatgagcagatcactctctgagcgcacggcgatgaagataaaggcaatgtttatgattttaaaaataacgtttctgccgactattttgccaaattcttcaagtccctgaaacagccaggagatatcagaagcaacagataccagatacacggcttcaatcaatagcaggtgctttttgaggggcgggtgcggaaatgcaagtgtgaataccatatatgcacacagacacacaattacgcttataacggatagaagctctatctcccagaaggtttttgtgcgttttgatctgtcctcctgcaggtatgatatttccctgtttccgtagtttacggtgcccagtgcggcaaacatgataaagtatgataccagtgagtaggtatagctgtatgcgcctattccgtctgccttaagtaccctcgagaggtacggtgctgtgatgagcggtgtgatcagtgtgagtatctggtagctcacattatatatgtagtttagttttatactcttgtttttttgtgttttctttttcatgcagatatcatatcacatattgacttattttggctatgcagttattatataaaaatcgcaaattaacattactatcaacttacacgtataaattacgacagggttatatagcttgtcccataggtggagaaatggataatattataatacgaaacaggaaagaggagtttaaggagcttgttttatacacagtttttggcaatatgacctttgtgatcagcataggctcatatgccatttttaatgtattctttggaatcaatgagctgattgcaaacgcgctggcatgggtgtttgctgttcttttctcatatgttaccaataagaagtgggtgtttaaggtggcaacaccgaccaagacggcatttttagtacagatgtttgcttttttcagtggcagattcatcacgctggttattgaagaggctattatctttatttttatcacgcttctggactatccaagcatgtgggtaaagctggcagcacaggtggttgtggtggtgctcaactatgtgataagcaagctgtttgttttcaagcatcactaaatgtggtatatttaataaaataataagaactataatagtgtgtgtatggtataataaagcgtaaatttaaatgtagtttatgagaagttgatttacatagggatatagaagctgttttttgcagtaagagacaaaaggagaagatcctatatgagtaatagacttgacatgaaaaaaaatacaaataatccaaaagacaaaacaaaatacgatggtccggagaagccggatgcatatataggcaatgacaagcaatgggttttcagggcattggttcttgcttttgttgatatgtgtattattgcaatctcattctttttcgctttgatgatcaggtttgagttttcatattcacatatcccgctctcatttctggagggctatctgcacattgtgccattgtttatggtgatttcacttgtggtgttttatattttcaggctgtaccatagtatatggcgttttgcgagcatcaatgagtttatgcatattattgctgcatttctggtgcttgcggttgtgagcgttactattcacgaggtgtataagattaagatgccgtatgccttctggattatcggactgatgctcagctttgcactttgtacagcgtgccgttttgcgtacagatttatcaggacaggtcagaagatgctggagcagagaggctctgcaaacggtgatgagaaggtcatgattataggagccggaaatgccggcaggatgcttatcagggagcttatcatgagctctcatctgcatacgaaggcctgctgtatcatagatgacaacccggcgaagctggggcggttcatagatggtgtgcctattgtcggtaaccgaaatgatattcctgagatggttgagaagtatgatatcacgaaaattgtgtatgctgtaccttctacatcaggtaaggacaggagggatatacttaatatttgcaaggatacaggctgtgatgtctctgtggttccgggaatctatcagatggtggatggcagggtttcggtttccaatctgcgtccggtaagcattgaggatttgcttggaagagatccggttgttgtggataatgacggtattcattcatttttacagggcaaggtggtaatggttacaggtggcggtggctcaatcggtagtgagctttgtcgtcagatagccagggaggatccgaagcttcttatcatttttgatatttatgagaataatgcatacgatatacagcaggagctgaagcgcaagtatccttatgtaagggtggagacactgattggctcggtgcgcaatactaacagactgcattatatattccagacatatcaccctgagattatttatcatgcggcagcacataagcatgtaccgctgatggaggaaagcccgaatgaggcaataaagaacaatgtgcttggcacattaaagctctcaaggattgcagctgagtaccatgtgaagaagttcgtgcttatctctacggataaggcggttaatccgaccaatatcatgggtgcatcaaagcgtctgtgtgagatggttatacagatgatgaacaggcagacggagactgattttgtcgctgtgcgttttggaaacgtgcttggcagcaatggtagtgttatcccgctgtttaagaagcagatagaggatggcggtcctgttactgtgacggacaagcgtattatcaggtactttatgacaattccggaggctgtggcacttgtgctgcaggccgggctctatgctcacggaggcgagattttcgttctcgacatgggcgagccggtcaagattgatgatatggctaggaaccttatcaggctttcaggactggagccggatgtggatattcagattgtatacacaggcctgcgtccgggtgagaagctctacgaggagatgctgatgagtgaggagggtctcaaggagactccgaacaagctgattcatgtgggtgagcctattgagatggatgatgagctctttgagaagcagcttgagatgctcgagaaagcatgcacctcagaagcaaaggatatcaagcagatagtggcctctgtggtaaagacatatcatcctgacctggagaactaaatatcttttgaagctcataatatagactgtaaaagccggatgtttggcatattttatgccggaagcgaggaacataactatggaaaagagacagatttcattttcaccacctgatataacagatgcagaggtgtcagctgttgctgatgcactgcgaagcggttggattacaacaggtccaagaactaaggagtttgagaagaggattgctaagctatgcggcacggataaggctgtagctcttggctctgctactgcgtgtcttgagtctatactcagattccttggaataggtgcaggtgatgaggtcatcacaagtgcatacacatatactgcatcagcaagccctgcggtgcatgtaggtgcagcgcttaagtttatagatgtagcacctgattcctttgagatggattacgatgccctggaagccgcaattacagaaaagacaaaggttatcgtgccggttgatattgcaggtgtgccttgcgactatgacaggatttttgatattgtggagagaaagaaggctctttttcatccgtcaaatgatgtgcagagggcaatcggacgtgtaattgtggcggctgactcggcacatgcctttggtgcttcttacatgagagcaggtgagcggattatgtgtggtaatgtagctgattttacaagcttttcattccatgcggtcaagaatctgaccacagcagagggaggagcactcacatggaggcctatagagggctttgatgatgagtatatctacaagcagtttatgctgctttcgctccacggacagacaaaggatgctttccacaagaatggtctgggcaactgggagtatgatattgtggctccttcgtataagtgcaatatgactgatatccaggctgctattggtctggtacagcttgacagatatgaggggcttctcaagaggcgccgtgatattatagagcgctatgacgaggcatttaagccgcttggtctcttgactgtgcctcattttacagacaggcatacatcgagcggacatttgtatctgcttcgcataccgggcatcggcgtggacaggcgcaatgcgcttatagtgcagatggcggagcgaggtatcgccacaaatgtgcatttcaagccgcttccgatgatgacagcatataagaatatgggctttgacatagctgattttccaaatgcttatcatcagtatgagaatgaaattacacttcctctcaacacaaagcttagcgatgaggatgtggagtatataattaataatttattggagattttacatgagtagatggagaacatggggagagattcctacattcatgaaaaatgattttacacttaaatattacaggcatctgagcaggaagaggacaagcatggtattcaaacgcatttttgatgtgattatgtccgctgttcttcttgtgctgctttcgcctgttatactggtccttgctgtctggataaaggtggatagcagaggacctgtttttttcagacaggagcgtatcacgcagtatggcaggaagtttcgcatattcaagttcagaactatggtgaatgatgctgacaaaaagggttcactggtgactgtcggtggggattcaagaatcacaagagtcggtgctgtcatcagaaagtacaggcttgatgagattccgcagcttataaatgtgctctgtggtgatatgagctttgttggcacaagacctgaggtggagaagtatgtcatggcatatacaccagcgatgatggcgacgcttctgatgcctgccggaatcaccagtgaggcaagcatcaggtacaaggatgaggacaggcttctggaggcttctgatgatgtggattacacatatatccacaaggtgctgccgggcaagatgaggtacaatcttaagtatcttaagcgattttcattgataaatgatatcagactgtgtatagagactgtgcttgcggtgatacattagtctgcttgtctgggaggatgatacttatgaataaagtcaaattttcagtattactgtcaatttattacaaggaaaagcctgagtatttcagggagtgtatggaaagcatatattcacagactgttttaccggacgagatagtgctggtggaggatggccggctgacagaggagctttatgaggcaatcagtgattatgaatgcaggccttcggaaataaattttgttacggtaaagcttgaaaaaaacagcgggctcggtcttgcacttgctgaaggcataaagcattgctctaatgagcttgtggccagaatggatacagatgatatatgtgtgcctgaccggtttgagagacagctgaatgctttttcggaaaatccggggcttgatatcataggcggatacatcagcgagttttccgatgatatgcacaatattttatcagagaggactgtgcctctcggaaattatgtgataaagcagtatcagagaaagcgcgatgcattcaaccacatgactgtgatgtacaaaaggtctgcggtgcttgctgcgggcaattatcaggactgtctgcttatggaggattctcttctttgggcgaatatgatcagaaatcactgtcgtatggcaaatataggtgagactcttgtgtatgccagaaccggtgatgatatgctgaagaggcgtggcggctttgattatttccttaaatacaaggcaggaagaaagcgtattttaaagacagggaccataagtgcggctgattattttgttacggttgcggcacagcttgttgtctgtatgatgccactttggatgaggagcctggtgtttaaaaaaatattaaggaactaaaacttttcaaatgcacgttaatgtggtaaaatcggtatggttaacattaataggcttattactagctgacacaggaggttaatataaatggattttagagcggagtacgagaaatggtgtacagacccatattttgatgaggctacaaaggcagagcttaaggctatcgcaggtgatgataaggagatagaggacagattctatcgcacacttgagtttggtacagcaggtcttcgtggtgtaataggagccggcaccaacaggatgaatatatacacagtccgtcaggctacacagggactggcaaattacatactttcacagggagaggatgcagtaaagagaggtgttgcaatcgcacatgactcacgtaatatgcatgatgagttcactgatgcaacagcactctgccttgcagcaaacggaatcaagacatatgtattcccacagcttgcccctgttcctgagctttcatacgcagtaaggacactcggcaccatagcaggtgttgttatcacagcaagccacaatccacgcgagtacaatggatacaaggtatactgggaggatggtgcacaggttactccacctcatgatacaagcatcatggctgaggtggcaaaggttacatcatttgatcaggtaaagactatagacaaggctgctgctattgaggcaggtctttacaatgtcatctctgatgaggttgaggagggatatttcggagagcttcgcaagctttctatccatccggagattatcaaggctatggcaaaggatatcaagattgtttacacaccactccacggcacaggacttcgccctgtacagagggtgcttaaggatatgggctttgagaatgtatacattgagccaagccaggcagtacctgacggcaatttccctacatgtccttatccaaatccagagaatcctgatgcatggaagcttgcacttgagctggcaaaggaaaaggatgctgatatcgttttagcaactgaccctgatgccgacagactcggtgtatattgcaaggatacaaagacaggtgagtatgttacatttacaggaaatatgtcggctatgcttatcggtgagtacatcttaagccagaagagtgccaatggtactctgcctgagaatcctgcatttgttgagtcaattgtttctacagatatgggtaaggcaattgctgcagcatatggggtaaagcatatcgaggttcttacaggcttcaagtatattggtgagcagatgcttaaattcgaaaagaccggctgcaacaactatgtattcggtatggaggagagctacggatgtctgcctggcacatatgcaagggacaaggatgctcctgcagcagtctgcatgctgtgtgaggttgctgccttctacaagtcacagggcaagacactctgggatggcatgattgacatgtacgagaagtatggctactacagagagggcatttctacactgaccttaaagggtattgatggtgccgcacagataaatgagattatgacaaaggcacgagctgctgagccaaagcagtttggcgattatcaggtgcttgctatccgtgattacaagaatgacacaagaaaagatatgacaacaggaaaggttgagccgactggtcttccttcttctaatgtactttactacgaacttaacgataacgcttggtgctgtgtacgaccttctggtacagagcctaagattaaattctatttcggagttaaaggagtgtctcttgaagattcacaggctaagcttgatgctttgtcagctgaggttctcggacagtttgaataaagactatgatgaaaatatacatttgcccggattgtggctggatacggatggtttcaagaaggaaagaggttgaatgcttcaagtgcggcagaccgcagatgcgtctgacgaatctggagtttggaaagtataccaatatgtcagagaaggagcgtcaggactacgcagacgcgtggctttacattcataggaaaaaggaaaaataacatggcaaagaagagaagaagaaaaaagagaagaagtggacgtaagaagattatactttttgtatttgaaatcctgttgctgttaattgttctgttagtggtttgggcttataataagacactcggacaggttaaatatgaggatgcgctgacagctagtgaggccggaatcaatgaggatattgatgatgatgctcttgccaatatgcatggatatctcaatgtagcgttgtttggtctggacaacagaagtaatggttcatacaatgaggggcattccgattgtatcatgatcgctagtctgaattatgatactaaggaggttcagctggtatctgtatatagagatacgtatcttcctgtcggcaatggaaaatttgcgaaggcgaatgccgcatatgctaatggtggggcaaagagagcagtagctatgcttaattcaaatttggatttgaatataaccaagtatatctgtgtagactggaaggctctggtagatgctatagatgatatcggtggtcttgatcttgagattactaaggcagagatgaaggaaattaattttctgattcctgaggttgattctactacagggtataatactccttatcttgagggggatggcatgcagcatcttgatggaactcaggctacatgctatgcacgtatcagaagcacctctggtgatgatttcttaagagcatcacgtcagagaattgtgcttcaggctatgcttgacaaggctaagcagtcagatttaggctcgctcacagagatgtgtaaggatatcatgagtcagataagtactaattttacagctaaagagattatccagtatgcaacagctgttacaaaatatcagatgaaggagacaacgggcttcccatttgagctgactacaatgaatctttctacaacaggagatacagttattccgattgatttagcgaaaaatgtttcggagcttcatcagttcctgtttaatgagactgattaccagccgactgataccgttcagacagtaagtgataagattgctaaaaagacaggtgttacatctaagacttcggcatttgatcttacgcaatacaatgatactgttggttctgatggaactgaaggagcaaagaaaaagaataaggacaagcaggatgccctaaagaagaaccagtcacaatctgaaaatagttcaggaaaaaaatcatcatcagatgattcggatgattaaataattaaataattaaagttagctattagggagattatttattatgaaaccggaaatcaaagaaaaaatcacggcaacaaaccagaaatacttaaagaaattcttaacagaggaagctccggctaagcttgagagccagcttgagcacatggactggtcataccttgatatgattcacaacaaggagcagcagagaggtacattttcaccgcttgctgctatggagatttcagagatagaggcaaataaggacaaataccttgcaacaggtcttgatgctgtcaagaatggcaaggtcggtgcaattcttcttgccggtggacagggtacacgtcttggatttgacaaggctaagggcatgttcaatatcggaaagacaaaggaactctacatttttgagcagcttatcgcaaaccttatgaaggttacaaatcaggccggtaaatgggtgccactgtatgtcatgacaagcgagataaatgatggcatgacgagagagttctttgcagagcatgactattttggatataacaaggactatgtgaagtttttcgttcaggagatggttccggcagttgattttgacggcaacctgcttatgaaatctgaggattcacttgctatgtcgccaaacggaaatggtggatggttcaagtcactcatcaatgccggtcttgataaggatttgaaggacaagggtgttgagtggctcaatgtatttgctgtggacaatgtacttcagcagattgcagatcctgtatttgtaggtgctacaatagagtccggctgtgtcagcggctctaaggtggtcagaaagtgcgatccatacgagagagtcggcgctatgtgccttgagaatggcaagccttcaattgttgagtattacgagcttactccggagatggcagaggcaaagaacgagaatggttcattgcagtatggctttggcgttatcttaaactatttattccgtgtggacaagctcatggctatcgcagagaagagccttccgcttcatgtggtagagaagaaggtaccttacattgatgagaacggcacagagcataagcctgagactccaaacgcatacaagttcgagacactcattctcgatatggtatacatgatggacaacagcctgccatttgaggtagacagagagaaggagtttgcacctgtaaagaatgcgacaggtacagattcggttgaaacagcgagagctcttcttgagaagaacggaattgaaatttaatatatgatttatggtaactgttcattggcagggatgtattgatattctgcaatttctatttatcgcagacttagatgtgcatctgccgatgagcagttatttttattcggagaatagcacggcgattacaatttatgaaaaaataaataatcccgtcacaaattaaacacagattgacagtatacttctaattgtaaacgaaaggagaaattattatggataacaattatggaaatatgaatgatacaaataatactaacagtacaaataacacaaataacaatacaaacaatgtaaatttcacaatgtcaggtaatccttacaatccggatgagtcacagaaggctgcacagactaataatacatcagctgaaagctattcacagagctacaatccatattcgcaggcttctgcagcaggacagccaaatgcaaatcagtcatatgcaaaccagccttattctaatcagtcgtataattcaggcactaataataatgcatatggcggcgcatcagccggttcgacagacaactcatatagccggacgaatatgaatggtcaggcatatcagcagactgcaaagcctaagaaacagagagcacctagaaagcctggtgcatttggaccatttgcagcaaagacagtagcggcagctcttatctttggactcgtcggaggcggcgttttcacaggagtaagctatattggcacgagagctatttcaaattcttctactgcaagtgcaaagcttaccactacaacatccggtgggactaagcagacatcatcaggggatgcaaaggatctgacagatgtatcatcagttgtcgatgaggtcatgcctagcatcgttgctatcacaaatacaggaacagtcacctacaacagctttttcggaaagaagtcgcagcagtctcagagctgtggctcaggaattattgtgagtgaggatgatgattatctctacattgctacaaacaaccatgttgtagcagattcagaggagcttacagtacagtttgatgatgattctgtggtaaaggcagaaatcagaggaacggatcctgacgatgatcttgcagttgtacgtgtaaagaaatcagaccttggaaaagatacttactcaaatatcaagattgctacaatcggagattcagacagtatagctgttggaagtcctgcaattgctatcggtaatgcacttggatacggacagtctgtcacaacaggtatagtaagtgcgcttaacagaactgttactacacaggattcacagacaggtgagactgttaccaacaacaagcttatccagacagatgcagcaataaacccgggaaacagtggtggagcactcttgaatgaaaacggcgaggttatcggtataaactctgtaaaatattcttcaactgaggttgagggtataggatacgcaattcctatgtcggttgcaaagcctattattgagagccttattcaggatggaaagtatactaatgagaatcaggcataccttggtatcaagggtggcgatgtttcatctgagatggtagcctacggcttcccacagggtgtgtatgtttcatctgtttcagcaggctcaggtgccgcaaatgccggcttacaggagggcgatatcatcaccgctgttgacagcacaaagatttcttctatgacagagctgcagtcagcattaaagagctatcaggccggagataaggttactcttaccgttgcccgtcagagtggcagacagtacgaggaaagcaaggttgatgtgaccttaagctctgcgaaggatatacagcagtaaattcagcactgtttctcctcacccctgcgtccatgcaggggtgtttctgcgtttcatgggcataatttctacagtatctaagccacttcgctattcgctc

SEQ ID NO: 1493 - DNA, 10816 bp, Unknown
  gut microbiota DNA sequence
tgtacccaaattaacctcctcttcttgcgtgagcaggaaaatctgaagtcgaataaaaatactgtatacttatgctttccacgtatataatgtgtacaataatcccttatataaaagccggcaaaatccccacaacccgcttttctcgcaatgttttcacatctgacatttcaattttcctgctattaactggtaacataaagcattgaaaatttccatgtctttgtcgaaaaatgcgaagtggtctgccctcttcaaagtgatacgcaccgataaaaatttgctgtggtgtcgtatttacagaaatataatgctttgagttgattgtagcacaggagagacattttgtcattaaatttctcagagtttcttatctttgggaatattcatagttcctgttcctatttatcctttcctctcctcatcgctacagctcccggcgatgatattgcacttcccaatacaagcttcaccagccagataaaaaatactatcacaagtacaggaataagacacgttgtaactataagcactgccagtccatcaatgaacttgttgaccatgttctttacactatctgcggtaactgacaatgtatttttcacactgtttactgcatccttcgccttatctataaagctgctttcagaatccttactcttcttgctatccttgtcatcatcctttgctgcttctgattcatccgctaaatcatttgcttcatcgattgtcgcatcaattgactcctggtatgtactgtaaatcatttttgagacatgcacacttaccggaataaccgcatatattgccagtccaaaaatgaatattttgacacctattttccaaaagaaatcctttttgcttccaaaatatactgccaacgcgagcattgataccggaataagccatttgaaagtcagcgcgcccaaaatagtcaacagatatttttcaagatatattgctgatacaacaatcaaaaaatatcctgccagatccattaatttatttgcaacaggagttccatcatctcccggcgctaatgtaataagtgttgaaactgctgtagcacttgcgctcagttccagcgcagttgttttcttttcatccagatactttatagtttctttatttatttttgactcaggcgatgaatagctttttgcaagtccaaaaaatgaaatacatgcaataattatacacactataattgcaactactctgaatagtaagcttctttcaaacgatgaatcagttttattttccataatgacttataccctcatattctataaaaatgttctttttgcctctccccggctattcttcaaggtagatgcagctccctcgccggctaaatattccttcaccagctttacaactacacccgaaagcaaaaataccgcgataaggtttggtatgaccataaggccattgaaggtctccgctatgctccacatcagtccgaggttcattgtcgcaccgactatcgcaacaagcgaatatactaccatgaacggcttatttgccttagttccgaataagaactctatgcatctggtaccataaagaccccagcctatgatggttgaaaatgcaaaacagcacatggcaaccgctgtaaagattgatacccagccgccataggtggatgtaaatccgctgatggtaagctctgcgccggctgcttctccatagcccacagaaactccgctgcagagtatgacaagtgctgtgagtgtacatatcacgatagtgtccacaaacacctcaaatatgccaaagaagccctgctttacaggctttttggtgtctgcacaggcatgtgcgatagagcctgttccaagacctgcttcgtttgaaaaaattcctctggaaactccctttttcatgctcataaaaaagcttcctactgctccgcctgtcactgctgacggattgaacgcgccctctattattgcccctaatacgcccggtatagctttaaagttgatgattactactccaagtgccagcagaatatacatcactgccataaatggcacaagcttttcagtaacctggcctatacgcttgattcctccaagcaaaataagcgcaataagagcggcaagcactattcctaatatgagattgagcgtagatgccgattcttttgaaattatatcgtaattatataaagctgaatcaatcgctgtggttatggtgtttacctgtgtagcgtttcctgtaccgaacacggtgagcacgccaaacgctgagaacagatatgccagccagtgccagtgctttttaagaccgtttttaatatagtacatagggccgcctaccaggtcgccgtttgcatttctctcgtgaaaatgtacagcgagtgtgacctcagagaacttggtgcacatgccaagaagtgctgaaatccacatccagaacaccgctcccggtccgcctatcgcaatggctcccgctactcccgccacattacctgtaccgacagtcgccgcaagtgccgtacacactgcctgaaacggtgtgagcgctccgtcagatgcctcacgttttttgagcatcctgccaagtgtaaccttcatcgcatacggaaactttctaatctgaataaatcccgttctgaagctcaaaagcagcccgacacctatgatacatatcatcgcaggcacgccccagataaaattgttgaccacgtcattgactttttctattactgataacatctttttctcctactgaatttagtgtaacgtataaagtataacacggtttgtacaattttttatatatttaatttcatttttttgaagtttttctttataaaaaacacccggatatagcaatttatctatatccgggtgtttttttgtataatatatacaggatatccctctacagtccctgtgtcatcttgtaatctataagtgtcatgagtgattctgactcgatggcgagctgctcacactcctcaatccacttgtcataggcttcactcgcctcatcctccggctcctttgcttcgagcgcctccatcatggcattgacctcggcaaattctgccttgatatcctctaagagagagtcttttgttgatttcatagtatcctcccaatttgatttaacgtaaaatatatttttatgattatttcacaaaaatttcattctataaagtgtggctcaagcatctcaagctctgccacatctatgcagtttggaatcgtgccgtttatcacgtcctgcttacactctgcgtagtcaaaccactttacagagtcgatttcctccttctgcacggtgatgtccgcttcgtccacatcgagccacagaagaaacaccttgcttatctggttgtccaggaatctctctccgtgaaacacctcgtctgcatggtgcctgtgcagtccacagtcgataagctgtttgggctctattgtcaggcccagctcttccctaagctctctgagcgcagacggtatatagtccacaccggccggtatgtgtcccgcacttgatatgtcgtagcatcccggaaaggagtctttttccatgcaccttttctgcaaaagtatctgtatggaatttccacggcgtctgactatccagacatgcgcagtcctatgaagtatattgtttctgtgcgcctgcttgcggtctacggtctgtcctgttggatttccctgctcgtccactatatcaaaatattccatatgagactccttttcctgctcaataaagtgcattttttgagatatattatagcttatttctgattaaggtacctatcccggaaatcaagaattcccgggatggttcggcggtcgccgaacttcgatttagccaaatatgaaattatgcaagcacaatttcatattcgccttaaatcttgtacctctcatcgcttacgtcctattcaataggtgctcctgccggcattggtttctccggtgtcaggagtgcgagattgccctctgcatcctctgcgcagagtaacattccctctgataaaacacctgcgagcttagccggttttaagtttacgagaaccattaccttcttgcctaccatctcctcaggagaatagtactttctgatgcctgatactatctgctttgtctggtttccaatctttacctgtgagcagagaagcttctttgacttcgcaactgcctcacattttacgatttcaccaacctggaactggagtttttcgaaatcatcaaatgtgatttcttcctttgcttccacatccataggctcaaggtctgcaccatctgcggcattttcacctgcaccacagccacatgctgccttaccctcaactgcagcaagcttagcctgctcagcctcaaactctgctttctgtaccgcctggattttctctacctcaggcatcacatcctctgcctttaatctgccgaagagaatctcaggtttgtctgtaacctttgtgccgctctcataaagaccaaatttgtcaaggtcatcgaactcacgaagtgttgtgttaagctgtgccacaatcttttctgctgtctccggcaggaatgaatgaagcaggcttgctccgattgtgatagactctgtgaggttgtaaagcacctcagcaagacgatcctgctgtgcctcgtcctttgcaagcacccaaggtgttgtctcgtcgatgtatttgttgcagcggcggaaaagtgcgaatacctctgtgatggcatctgccacacgaagtccttccatcttctttgccactttatcccttgtgccggtgacaacggcctttaagtctgcgtcaacagcagcctggtctgcatcgcctgttgcgcctgtgctctttacgataccgtcaaagtatttattgctcatggaaactgttctgtttacaaggtttccaagtatatttgcaaggtctgaattgaatctctcgattacaagatcccatgtgataattccgtcgttctcgaatggcatctcatgaagcacaaagtaacgtgtggcatctacgccgaaaagtctgaccatatcgtctgcgtagataacgtttccttttgacttactcatcttgtcaccgccctgaagcagccatggatgtccgaatacctgctttggaagcggaaggtcaagtgccataaggaaaataggccagtaaatagtgtggaaacgcacgatatcttttccgataaggtgcagatctgcaggccagtttttcttgaaaagctctgatgatccgtcaggatcgtaaccgatttttgtgatatagtttgtgagggcatcaagccatacatacactacatgctttggatcgaaatctaccggaattccccagctgaatgatgttctcgatacgcaaagatcctgaagtcccggaagcaggaagttgttcatcatctcgtttttccttgaaaccggctggatgaaatcagggtgtgtgttgatatagtcgatgagtctgtctgcatatttgctcatcttgaagaagtatgcctcctcctttgcaggctgtacctcacgtccgcagtccggacattttccgtccacgagctgtgactctgtccagaatgactcacatggtgtacagtaaagtccctcgtatgaacctttgtagatatcgccctgatcgtacagcttcttgaagattttctttacacatttctcatggtcctcatctgttgtgcggacaaaattgtcatatgatgaatttaccatatcccagattctctttacctcacctgaaatctgatctacaaactccttcggtgaaattccggctgcctcagccttttcctggattttctgtccgtgctcatctgttcctgtctggaaatatacgtcgtatccctctgctctcttgtatctggcgattgcgtctgcaaggatgatctcatatgtgtttccgatatgaggcttgcctgatgtgtacgcaatggctgttgtcatgtaatatttacctttgtttgccaatttagtttcctcctaattttcttaaaatgcgtataaatacataacttatgccgtctgatttcgcataaagcacttatgcaaacaagtttgcgcgttctttatgctcatcatacttcttttatacgctaaaaaacgcctcctcaggagaaaactcccaagaagacgattatatcgtggtaccacttctcttcacgcagctatcaaaatcaccagacatcatataccggcactgctgcgcctctttccgctataacaggcggttcctgtcagtatctagccaatggttcgatactgctgctccaaagccatgttcctcttactttaggtcatcccctctcagcctgtgtgggatttctctgtgaatctgccataaaagtactctctttttcgtcgcttttatctcatacatttctagagtagcatgtggtttttaaattgtcaactgttgtaagtcaacaaacttatctttcattaaagaaataattgtactttaattatggattactaagctattcttcctttagctctgcaatgagacataatacatatacaattcctcaagacctgcctttacaacagaaaaattataacctctaggttcactttcgcttattattctgtatatttttccattcgctcccatttttatgttaacaatcatgacattttcttgtttgaattcatcctcagaagatgtttcgacctcgtataccttattatttagcttttttagtaaatgctgtggagtaccatgctcaattatttctccgtgactaagcaatattatttcttttgcaataaattcgatatcagagactatatgtgtagcaattataattatcttattctccgacatttcactcaaaaagtttctaatgcgaatcctttcactcggatcaagccctgcagtcggctcatccattatcaaaatatccggatcattaagcaatgcctgtgctatcaatattctctgcttcattccacctgaatacgaacctatttttttgtttttctcagaagtcaaattcaccactttcaaaaggttatctatcttattttttgcatactttttttctaatccctttaaagctgccatataccacagaaactcttcaccagtaaaattgtcataaatctcctgttgttgcggcatatatcctattttttcacgatatttacttcccaatttactaatcggatctccatcgtaatagacgcatccccgatccgcttttaaattgtccgttataatattcattaatgtactttttccagagccattagggcctagtaacccatatattcccggtgtaagacttatgtctacgttgctaagagcttttttgctttttccataagttttactgatattcttaatacgcagttccatcatataatccccctgtttgccagctttattaatatcattgttaaattgatttttgagaagtaaagaattaaagcaataactataacaaacaatgtcacaaaaaccgatactacaaattcattgcctgttttcttcgaaagagcaattgtaatagctcctataagtccaaaacacaaggcttttatcaaatagattaatgccagaaatacaagtaacgatattcctgctgatatttgaggctcatataatttactaacgtttactttcagttcttctatccccaaaacatgcatataacctgcaattgatggtataaggccggtcagatatattatacctccaataattatagcgcagctttttttcactctcattagcctgtatcttccgttttttgaagtttttagcaacagactaacctgcatttcatctttagaggcaaacagtcccgaaataaacataacaagcactattgatacggtcataaaaataattatatcgctcctataatttttcattaccgaattcaaattcatctcgtctatcatatatccaacgctgccatcatctgtcatcttttcatattgctgatttaatctgtcaaacgctctctttctactgtctaactctgctgttatctcggctgtgtcaattccattattttctatcgccaattctatctgattttccacgctttgaatatactgcttttctttttcaatatagtccacagtttgctcatcaatttttccatgtatagcagacaaatacatatgatatgtcgcttcatatgcactctgataggtattggccggcatatatgtcttatatgaacctataataccaatagataaaaacaacagtaatatccattttttctgtacaatcatcagcttataaaattcattaacatacatattttcaacgcataatagccgtgaaaaaatattacgaatcttttcccgtatatattgcaacacaaccttaatctcactaacatagcgtatactgaacaatatggttccaattagcgttgcaaatacaataatcgctaatcccacaataaaattaacataatttttatcaaccggggttcctgcaatattaagattttgatacaccccaataacatttttcatattccatgcataaaatatgttattcggtgaatcgtttaaactcaaaaattctaataaaaaaatagcaattggaataccacactccattattctgctatttattgatacaaaacatacaaaaacaatactgcaaataattattgcaataaacatatgatttaatattgatattataatcgctgtaaacatactgatttcatatggacaatccctgaatatctgtaagctctgaattgaacacttaagatttccagttgaatacataaatgaatcaaagacaattaccattatctcctgaacaagtgaaaaaataactgtcatcacaaccagcactgtccattttgacaaaataattctgcttcttccttctttggtcgccctaataatacccagcattgcgcttttacgttctgaaacatatatgtattccatacaaacaaacgtaaatacaatacaaaaaaatattccgtatgtatagtctgcgtatttttcgacaccccaattatatttttgatcaatctgtacaccggataatcttttgtaatctgataccattttgtcaatattgcgcttataatagacatcattattatttcctaatgacgaaagaagtgtctgcgctctttcatctatgccatttataaatatatcatacgtttctatgtattctttttgcagactatttctataatccacatattccgcatttttctcaccaagacagtatataattgtcattatctctacaagcagcatgatgctgacaacaactataaacttcttatttcttactaatttttttatttctccaataaacaatacaaatcccccaaactaccatacaatgttattaagctccccaaaatcacgtacattaactattttaggagttattttatcaccattgcattttttaacatcatcaaatttaatttcacacacactccatgatgtatcattttgaataacatcaacagaaactccatcaggaccaaatcctgcaaatgttcctactgaattcagctcatattcaaaatcagatacctgctttgcatcggaagaatatattttcacattacatgattcagtattatcattattgaaaaattgtatgtctgcatcatctattatcacataatcatcatatgtcatgattcctgaatcctgtggtatcccgtccatccagacagaaatatctttcgtatcatagttcattgcatatatcggtgtctcatattgcaaatcttgcatatcatcatatttttttataagcagcttgtcctttaaaaatgctatcgctccaatagcatcagtattgctttttttgtcaggaacatcaattactgacaattgattgctatcaacatcatacatgtaataattcgattctagagattttatccaggattcattgtcagtcatagtgaaatctttgctattacacgatacttgaaaaaataatttattcttataggcttgtatatttcccatttcttgaagatttaattcatcttcagtttcaaatataacttcagagttcttctcgtccattgattttcctaattttatcatgctgataatacccttcgaatatactctttccccttcataagtatactctttaagcccataatatagttttcctctatggatgagccagctaccaacttccttgccttctcctaccatatatattttctttttacttgaaccatctttactgacactatataggcttgatcccataaagtaatatactttgccctcataatactgtatatacttatagcctgaatcttctacatcaactgaagctccatcagtatcaccacctctattcaaataggcattgcagtctcctcgtctctccttatcattttccatatcatgaaggcaatttgccttactacacaatggattcatctgctttgtttcattgttgtaataatatatataatcattcatcaaaatgtattgtccattaccatctgactgatatttcttccatgatactatacttgttgcatatgaatactgatcatctgtttcaaaattatactcgccactatagtccttagcattatcgcatcccattattgaaatcgccataagcataattattaccaatactttaattctttttatcttcataaaaatccctcttttacttaataaggcggtccttgttaaccgccttattaaatcattaattattatttaccatgtcgttcctatttttgtattattttcccaggtatacgcacctgattttatgtaatgcactccagaaccgccataaacatttccttattgtcccctgcaaagccctgat

SEQ ID NO: 1494 - DNA, 2323 bp, Unknown
  gut microbiota DNA sequence
aaagtgctggctaagagcaagcactttgagccaaccgctcacgtgcaggatctcgcagagtatgcttctcctatcgtttcttgcggtaatcagaccggtgagggctggtttttgacaggtgagatgcttgaactcatcaatgaggggggtacaaacatcatctgtgcgcagccttttgcatgcttaccgaaccatattgtgggtaagggtgttataaagagaatcagacatgatcatccggatgccaatatcgtggctatcgattatgatccgggtgcttctgaggtgaaccagctgaaccgtattaagctgatgctttctacggcacagaagaagcttaagaaataaaaaattcgcccatgcgtccatgcatgggcgttgttggttttcgtatgcaattctacagactctaagcagcttcgtatatgcggttaagggcaaaagccccggctgcgccgggttctgtctttggtaactttccacttttatatgtgcaaatgttgctcgttgcactcgcttatatgcttgctagctaggacagatgcttcaaaatctcatcatattgggtatacatcttctgcacttcattttccagtgtatagtagtgcatgatatatggcaccaacagcactaagaataacagtgtaagtacaagaagcattgggttgcttatcatgatggatgcgattattgacatcatggtgagtatagcaaaggttactgtcactatgaggtgcacaaggcgctcatgctggaagaaggctatttgtgtcaggtgttcctgcagtattgtcttccactcttcttttgatatcttatcaggattggcaagcagattgtcaatctttagtctataattaattattcgttttttcactgtgttttctaccttcttttatcaatcagacagcattttttaattaagcttggatttaatttcttccatccttgtatcatccagcttataaaacctcttaaatacaaatatgcccacaatgagcaggataacagacggaatcgtcatccacatgcgaagagcatcaagtgtatcctgtgtctgtaccgcagccgcggtatccagatgaatccagtcaactaccagccccgccagaaataccgccacaccggatgcgagctttaccgtaaatgtctgcatcgagaaaatgacagactcctctctcgtgccattcatcacctcaccataatcaacagaatctgatagaaatatggtcatgataacattgagcataccatagcccagataaatcaaaatacccggcaggcagagtatgtaccagctctgcggcgtgtagagctttgcaaatgccatgataagtatcaccgcaaagcctgctatctgaataataaatcctgatataaaaagctgacttttgctgaatctcttgcgaagcagcggtataaccatcatgacaagcacctgtgctgcaaaagcaactgcggcaaatatagaatatgctccctcgtttcccacatcaaaccggaagaaataaagcactaggttaccacagatattgagtgatgtatacacgagaatgattgataccacaacagtcattgcctgatcattcttaaataaggctttaatcatatcagatatctttcccggcttctcatcacaggcaaccggtctttcaggcacacatgccacgcatacaagctcagaaatcacaaatactaccgctataataagtgcccaccacttaaatccaatcctgtagtcagccatagagcttcctgcaccaagaatcggcaccactgtcatcgtgagcaccgtagggatagcatctccaatgccagagcatgtcctcgcaagcgatgtaagctgctccctgtcgctgcccggctcagtgattgcgggaatcatagaccaaaacggaatatccataagcgtatatgtgatgccccatgcaaagtaaaacaccgtaagccacactctctgcgctgaatcacccatagactcaggagtggcatataaagcatatatggtcacggcattgagcaccgtgccggcaaaaatccaaggcctaaacctgccccacccggtacgtgtctttgctacgataatgcccatcaccggatcattgaatgcatcaaaaatcctcgccgccatcatcaccgtaccgataaacacactgctcatcccaagcactacattatagtagtagagcaaatacgatgaaataagcatatatacaatatcttttccgaatgcgccaaatccgaatgcgcacttttgtcctgttttaagtctcatagaaatacctccaaaataatccgctataccagcctctggtataaagta

SEQ ID NO: 1495 - DNA, 9690 bp, Unknown
  gut microbiota DNA sequence
agcttatcctcttttgtagtaataaacttttgtttttgatttataatactctccatatcataactattacgaaccgagataaatatttgtgaattataaccggctatctcaaactcaattattcttttgtcctcttgtatttttcacatgcctctatggcattatttaagagattcgatattattgtgcacatatcaaacatatcaattgctacatcatccgatacgcgccccttaaactgaacctttatatttttactttccgcttccaggactttcgtctaattcaacaaacatcccttgcctcatttcgaaataaaacctatcatcatatatttaccatttcaatactttaatgctatttgataggatttcggtgctatttagcaataaatcgtaaaaaatactttaatcattgatttattttatttataatacaaatataatctttatggaggctgcaagtatgtatttaatttacaaactttacttttccttaattaacaatcttataattgtactgtttttatttcgcttctcagaaaataatatgcatactgtcttttccataaaaagaaaaataatagtttttactcttgcttcactgtactctattgtcccattatcaagatttgacttaattatttctaatgtctttttcttattgacactttattacctgtctgattttaaacttaaacaaagtattataattcttataaaatttgaggtattactccatattgcatctgctattatatgttttttacatagcctgctattttctgatgctcaattgctatatgataatgtgatctatcaggattacaaatccattcttgtggaaataatagcttacgttgtttattgcctatattgcaatcttttcaaatcaaatactatcaaaaacatgtacttgctgctcttcaatattactattttaggcatttgtttattgttaagttacataaccttgtacatctgctactcacttccaaaatcctatatgctttcagctatttttgccattattttcgtacttattatcatatgtatttcactatatgataaatttctggcagtcattgaagaaaacactaattatcggttcaagcttgaacttaataaaatggaacaggaatattctgccaagctcgacgataaattaaatcagcttcactctttaagacatgatatgaaaaaccatctgatagtaattgatggttatgcttcacagcacaatgatatgaaaattcatgaatatattcataatatttgtgaagacctttctctgacaaatgctgtagattcaggctctcatatcgtctcagctcttatagctgaaaaagaggacaaggcaaagtctcaaaatatcagatgcgaaattaatataagtacacccgatattaatattgacgatttttcaattacgaccataataggtaatctgtttgataatgcgataaaagcagccgctgagtgtgaacatggctggatcagattctccctcacccagaccggctcatatatgaatatagttattgaaaattcctacttcggaaatattatagaaaaaaatggtgaatttacatctaccaaaaatgacaaggtcttacctcatggaataggcataaaaaatgtccgtaaagtcgtttccaaccttaacggacaaattgatttttcttatgccagcggatattttagcgtaaaggcagaactccctaattatagttaagttcctgctccttatatgctctccttatcttgtccagatgaagctcctttatctgatcatgatatttcctgctcaaagggatctccatgcctcgtccaaagcataccacatccttttttacttctttaatgtaattaaaattggctatgtaaccctgatgtgtatacataaatacatcattatccaatctttcatatacatttttcagaggctcataacagtatatttcctcattccttttatggaatacacactgatttctgcgtttttctatatatattacattttgaaggtctataagaacatcttcatatccggatttaatttttagatatcttttttccgctttttgtgcatttttacgataatcaatctgaattcttgctttttcgataatgtgctttacctgtgtatattttatcggtttcatgacataatcaagtgcatcaagtctgaatgcctgtatcgcaaatgcatcataactcgtcacaaatgagatacatacccatgggtcgatttttcttaatgcatcagccatctcaatacctgtcatgccgggcatttccacatcaagaaacaataaatcatattccttactcttagaaaatatattattcatgagttcttttgcattatcatagagatctatgcttacattaatatccatttcatttccgtattcactcacgaaatttttaagttcattccgaaaaaattcttcatcatcgcatattgctgctcttatagtttcgtattgcatatattaaattccttaaaatccccctataaccaccttacagtccttctaagcgtcttacagttacaatgtcatatatttatgtaattgtcgcggtctacctctatcacggtatagtaattctttccaagctttttcctgacattttcctgtattgcattgcatatatcatcatctgaggtgatataaccaaatggaactgcaatgtcaaaaaccagattcgtatgtgtatcacctctgataatacggaaatcgtgcatatttatgtgcgaatcaagcccttttatcacggagagcacctcggccttcagtccggctacctcctcatcctctatcgctaccgggtccatgtggatggtcactatacagcccagctcccttcgtatcctgcgctccagattatcgattatatcgtgcagctcgaccatatctccgtcctccggcacctctgcatgaaacgatactatcctgtgtcccggtccataatcatgcaccataaggtcatgcataccgagtatgtttttgtcaaagtccagtaccatctcccttagtctctcgacaaactccggctccggctttgctccaagcagcgggtctatcgcctccctggctgatgatatccctgaatagaatataaacaatgacacaaatacaccgcctattccatccagattgagtcctgaaaagtgcgctatgagtgtggctgcaagtactacagatgtagcgatacagtctgacagactgtccctgcctgtcgcttcgagtgttgatgaatcaagcttttttgaaaaatagaaattgtataccgccatgacgcattttacagctattgacgccagtagtatcgctacaataagccatgaaaactctatatcctgcggctttatgattttgccaaaggaatccctgaacagctcaaagcccatgatgagtatgattgccgcaactgccagtgtagccacatactccatcctcgcgtgtccgtatggatgctcctcgtcggctctctgtgccgccatcttgaagcccgctatcgtgatgattgaggagcctgcatctgacaggttgttgaatgcatccgcagtgattgagattgcaccgcttagcattcctgcaaaaagcttgccggcaaagagtatgaggtttaaaaatataccgactataccgcacagcatgccatatttatttcgtttttcaatgtctgtttctgtctttggcatttactttacctctatttttattttatatcctgatttacagcttatttcaccgctccgaatctgtcgaacgggtaatatctgaatatcgcttttgcaagtatatcgtccttagacacatatgtgtgctcccagactctagcgtctgatgagccatttctgttgtcaccgagcagcagatatgagtcctgtggcaccttaaactcgtaaggtccggcatttactgtccacggatcctcaccgctctggtttgacttgagataatcctcctcaagcgcctcaccgtctatatacacccggccgtcctctatggtgactgtctctcccggcagacctattacacgcttgatgtatttctcagaaggcgaatccggtgcattgaatatgactatatcccctctctttgggtcagaaaatgtatatgcgagcctgaagccaaatatgtcatctccaatctgtatggtgttctccatcgagcctgacggaatatttgcatttataatgacatagttctttatgagtattgccgctacaatggcgaatgcgattgttaacacccagcttaagatttccttgacaggtgatgttttttcctccggcttttttggctccatctcatcggttgtttttgtgtcttcttcgttgtttaagtctaatatctccattttcatgttctccttattcatgcttcaataagtgtttgataatatatgtcatggcggtacaacctatggtgccatccaccactttataaagtccttccttgtaaaataaagacttgtaagcccgtaatccgcgatttccttgtctgtaaaggtctttgctatatacgcattgatttcatccgggaagtctctctcgaggcaccactgtgcctgcaggctcattggcttttccagctcatattggtgcacgagctcgcctccaaaatctatgatactgttccatctggatgcattgcccagtatcctctgcttgatattttctatgatcacagctcttgcaatccttacctttttgtacttttcggcgcgctgcaaaagcattgcattgcggttgtgggtatttatcaccagctccatcgggtctgtcagctcatttgacaccagacaaaatacagggtccagatcataatactccggtcttagcacgtaatcgtttcgaaacgatgctgctgtctttgccacggttatgtctgccgatacatccgtgtatatgatgcccggcatgtcacccataacatactccatcgatgtgatatacggtgtcataaactgccagaaggctctgatattctgctcaaatactatgatatcgtacttgtcaataaactgaccataatcataagggtagttctccctatagtgggcaaaaagcgctctctgcatgaaagctatctttattttccgcccgataaagccgtttattactgtcctcaccgggacctctacctcgcgctcctttatatatacaagcacctgtacagctctgcttaccagctcgttttccgcctcgtattcacataccagccgttttctgccatctgacagatactggccaagtgtaagcgggctctgcccaaaggcatctatgataatctgtcctatatactggcggagctctatgagcttttcatcgaaggctgctccgtctcttgatatgcttatatttaaaaacctctttttgatattgagctgatacgagaaattgtctatccatgatggtgcaagccccagtatgtctgtagcatctgacacaagaactccctgctggtacagcgtggacttatgaaaataccccttgtgctttggatgatatatggcaacatagccctcaagcaggctgttatccactcgtatgatattcatgccaacaagctcattcatcggatagttccactttgcctttggctgtgacaggcatacctccctcgtatcacacctgatatttacaggtataggcagtgtaagcatatagtgctttatggtttctactataaagtccagatctatatacggcgcatatgatggttttacggggatagagatgcgtgtgcccggtgtctttttctgcgatatgacatactctatctggccactctctccaaaccactttgccatgaccggtgccgtatcctgcggattgcttatgttccaggcagtgtttattaccttatcctttttcgactcgatgagcacagcctttgagactgtaaagcacgagcatagcccgatgccatagtgagaatacggctcatacttcagctgctgattgaagaaatctgtgcttgtataatagcttgcccctatctgtgcgataaagtgctccaggtcatattcatttatgcctactccattatcctctatcgtaaacagtcttgtatcactgctgtacgtgatgtctatgcgtggctcatatatggccctgacatcgcgcatctggcttgcctgctccatctcaaggaactccgtgccccagctccactcaagtgcctgccgcacattgcaggcatccatggcattgagcaaaagctccctgataaagaccttccacgaagcataaaactgctggcttgcaataagcggaagcatatttgattttcctaactctacatcgatgcttttcatgctttatccgactgcccgtaatagctgccgtagtaattgccatagtacccactgacatggctgtttttcttgttgtttaccttgttgagcacagcgcccagtatcctcactcccgatgcctcaagctgttttttcacactctgaatcatcctggcgctcgccatgccctgtcctatcactattatagctccgtcacaatactttgctacaactgccgcatctatggcagctcctatcggtgcacagtctataattatgtagttaaagtgctccttaccgaaattaagaagctcctgaaagtattttttctcgagaatctctgtcggattcggcacagacggccctgcaaatatcataaaaaggcccggtatttccgtgccatacatcacttcctcaagacgtctctgaccggaaagatagtgcgacaatccgcatatctcccctccacttgccactgtggcacgcagacgccctgcaaggactgatttacgcatatcagtatctatgaaaagcactctatttcctgactctgtaagcgaccgcgccagatcaagtgccacggtgcttttgccttcatttggtacagagcttgtcacaagaagcgtgcgtatatcatccccgcaaaactgtatatttgtcttcaaagctcgaagtgattccttcatcgtatagctttgttcttttagcttgccaaattttactaattccatctgcccatctcctgatacaggctcccttatgctgaagccgatttcttttttcttttctttctgtggctgcctctgccatgctttctgccctttccttgctctccgtcatcttccgattcatcaagcggaagtgtaccaagcacgttcatgccgagcttcttctccacatcctctgtatctatgattgtatcattgaacagataagaaaccactataaccgcaatcgacagaaatgctcccgcaaaggctcctatcactgtgtttttgccgatattagggcttaccgcgcctccatcatcatatccgctctggatgatggtcggcggatcctgcttcatcttctccgctatatatgctgatgcgacctttgctatctcatctgctatggtctttgccatctgcggatcgggatccgttactgtgatattgagtactcgcgagttggacggattatcaagcgtcacccttccgccaagtgtcttgtagctctcattcagattgagattttctatgacctgatccagcaccggacgtccctttactacaactatgtaatcatttgtcaggctggtgcctgtctggatatccgcaaggcttgtgatggatgtgctctttgaaagtacatagagctcagatgtagattcatacataggtgtaatcataaatctgcttatcgcaaatgccactgcacctgttgctatcgtaacaagaattatccactgccaatatgaaattatctcaagaaacagatcctttaagtctatctctatctcgttgtcaaaatcctgttctctctccattatttatccccgcatttacaatgattatcttccgtttattatattttccggtgtggtctgcatgatttcctgcgcgtagtcatcaccgaacttctttgccacgtactcatagcattttttcatattgcagacgcgctcctttgtgccatggctgtcgcttgctattacatcaacaagtcctgccttcaaaagcttctttgtgtatctcttgaagtgtctgccatctatgccaagcactgagtctgcattgacctgtatgagtgctcccagctcctgcaaatcctctatacggcttatatcactgagacactcatatctctctacatgtgctatcaccggtatatatcctgcaaatatagcttcgcgcgtcatcttgtatacaaacgagtattcgctggaatgtgaatactctgtgagtatatactgtgtatctgccagtgtatgacacagcccaccatgaaaggcatctatcatatcggttgccacatgatactctgtgcctagctttaattctattccaagcttatttgcatatggcatcagctttttatagtgtcgctctatcttttcaagcggatgcttaaacattccatggcgcaggtgcggtgtgaggattatgcctgtaatgccctgctttttggctatcttgagcatctctaccgattcctcgagcgactttgagccgtcatccactccgtataataaatggcaatgtatatctatcaaaattcatggtcctccgttttgttttcctgaactatcattatactatatacagatttttcgtgcaattctttagatattaaatttttcttcttttttgtgtggggagggcgtggcgtaagcgccgggcatccgtgcagcgcacacgcactcccgcgcctgctacgctacgctgctaagagactgtacgaattatgccttggggtggttctatgcttgacgaaaccggcttttatgcgccgtccgtggcgcataacgccttgcccggccgtccatggccgggcatttctgtttttctttggcataattctacagtctctatgcagcttcgctattcgcctgcgtgggagtgcgtgtgcgctgccggatgcccggcgcttacgccacttacgttgtgacagtattttacgattttagatttgcggttttttagttattggttggttgcaagcttgacaacacgctgtcaagcttgcgtttgaaagttattttttggtggattactacgatatctcatgatgacaattaacatatgtgtcagttttcagatacatcacatataataagtattcgaggtccaaatatcaaagatatttgaacctcggtggattatgctataatactataacgccatagcaccgtagcactatagcgccataatgttataatgccattatgctatataattatattatccgatttgtctgacgagatttatcatttcgattgcaccgagtgcacagtcatatcctttgtttccggcttttgttccggctctttctattgcctgctcgatgttttcggtggtaaccactccaaacattaccgggatttctgattcgagtgatacggatgcgattccctttgatacctcgttgcacacatagtcatagtggcttgttgcacctctgattactgctccgaggcagatgattgcatcatattttccactttttgccatcttctttgcgatgagtggtatctcgaatgctcccggcacccatgctacgtctatgttttcctccggtacgtcatgtcttacgagtccgtcctttgctcctcctaaaagctttgatgtgataaattcattgaatcttgctactacgattcctaccttgattc

SEQ ID NO: 1496 - DNA, 451 bp, Unknown
  gut microbiota DNA sequence
gtatcttcacagcgttcatcactcggtgctgttcagaaccgtcttgagcacacaatcaacaaccttgacaacgtagttgagaatactacatcagctgagtctcgtatccgtgatacagatatggctgaagagatggttaactacagcaagaacaacattcttgcacaggctggacagtctatgcttgcacaggctaatcagtctaaccagggtgtactttcactcttacagtaatcatctacaatttaatgttgtacaaagcaagaagagctcgaaagggtaatgtcattaagttaagaattttgacataattataaaacacatcatatttgcaattgtttgataaatatgatgtgtttttttcttttgtctattttgcagcacaacaaaaagacagattgtttatctgtcaaaaaaaacttataattatctatgattaagccactctata

SEQ ID NO: 1497 - DNA, 27254 bp, Unknown
  gut microbiota DNA sequence
aactgttagtaaagaaaatgttgacacatagtaattaaagtggcaaaatttaaaataaaaaagaaggactgtctactaacagttaaggctggggatgctggagccaaagcagatattggtgttcagttatatggtgaagatggaaaacttaaacctcaattcggagctagcgcaaaagctgaagccaccgcggctgagctggaaggctcattaggagtaaatgtacttggaggtgaagttggtgttagtggaagtgtaagtgttggagtaggtgcacatgcggatgtgggttacaaagatggagtattcaaatttgatataggagcttctattggattggggggttctgtaggatcagaggtagatattggaggtatggtagatactgtttgtgatgctgccgagtctgcatggaatggattagagaaaggagggaaaaccgcaacaaactggtttaaatagttcatggataaaataagtacaacaggagtcatagatcaaacaatttatagtgatggaggaaatgttatgtatattgtgaatgttgaattaaatggtaatatagtaaaagcacaatctattcattattcatctaaaacaaaaagtttacctaatgggaaaaaagtttctgtgaattattgggaaacacccaaaggaagaaatagattggttgaaattttagatgaaaatattgttccttgcaaggatgatttgtcaggtgatttgagattattggcatcgtttggtatattggtaattattgttatatgtatttttatggtaaaaaattaatctaggatatattatgaataattacctattggaagtgtagtcttaattggaaatagtaaaaagaaagttatgattgttggtgtctgtcagaaaggtggtcaggatcctaatgcaatatgggactatacggcgttatctttccagagggatatttagatgcagagaaaatgtttttattcaatcgtgagcaaatttcacatgtatatgctttgggatatcaagatgaagaacagatggcatttaaacaaatggcagatacaaaaattagagagttaaaaggagaataaaaaatgaaaaatttattaaagaagcttagttgtatggtgttaattgtaggagttgtaattggctgttgtgcttgttctactaattcgtcaaaagcatatacattcaaggttgatacaggggatcaggtaaaggttgagctgaatacagcagatggatatgatattacctctgatttaccatttgttatatcaaaggataataaaaccttgagccagggtacttttattacagctgatgattatgattcatatgtcagtgtggttaatgacacagacacagcaaccgttattgacaaaggagataatgaaacatacgagtatatcatgtggaataacaatgatgaggaatatgattatgcaattcacctcaaagattctaaaacaggtattttaattggaaacaatgtttcagaaaaatctgctaaggaatgctttagtcgtttgaccttttcaattgtaaaatagaattattaagtatgctaaaatagccggcatttttgtgccggctattttggcatatattaaatgttatctatatttaccatatgtaaatatggtgttgacaaaaaatgaaaataatggagtattcaataaaacccaagaaatgggagaaaggagaataatccattaacctcaaaagaggataattggattatacgtgataaacatggcattattaaattatgaatttgataggcagcttgaactcgagagagccgatgcgtatgcagagggcttcctgagagggtataaaaagggctttgaaaaagaaatgcgtaaacaaatggtttttaacatgtatgaagagggatattcagttgatctgatagcagatattgtggtggaattaaccaaagaagaaatagaagatgctataaaaataagaaagaaatgatttggtacaaaagaatatctgctatgatgggaacatagactgtgatggtatagaaggaacaaggcaatacagaatattatggcaattcagataatgcgagagacatatcaggcacaatgggaattatcctgactgtgccgattatatctctaatcaatcaaaagcacgttacaacaaggtatatcacaccaagcacccagcttgaaaatatgccgtacagtatcacgggaccggcaatcctgaatatctgacagcctatgccaaatacctgcccctccacctgaaactcacatgcggatgagcatactccgtttgcaaagccggttataggaacaagagctcctgctcctccccagtttgcaagcggtgcatacaggtttagcgatgtcagtacgcagcttataagaatcaaaatcatgctgcaccaggcagatgcttcgtcactgcttaaaccaaagtattgtgtgcaggtatttactatgagctgtccaatagtgcatatgatgccaccgagtatgaatgcctttagcatgtttgcagaaaggcagtgagtaggtgtgacgcgctttacatatttgttatattcatcatttcgtttttctttttggtcagtagtcatgttttcagacctccttttttataggatgaccgtattttttaaatgtattcatatatgtgattttagttatttgatttgggtatagttacttattagaattaaatatgaaggatatatcaaataatccttgccactttctgctttaaatagtagaattgtagcaaggattatttttatgcggtagcgcatcaaagtaataaatcacagcaaagcatataattgcgataaataatgcaagtattttgcaataaagaaaaggagacacatatatgtatacacttgacgacatcaagaaagaagatcaggagattgcaagcgccatcacagacgaatttgagcgccagaacagccatatcgagcttattgcttctgagaactgggtaagccctgctgttatgtcagctatgggaagcattctcaccaataagtacgctgagggatatccgggaagaagatactatggcggctgcgagtgcgtggacgaggtagaggagcttgccagagaaagagccaagaagcttttcggcgcagagtatgtaaatgtacagccgcactcaggtgctcaggccaatatggcagtacagtttgccatcttaaagccgggcgataccatcatgggaatgaatcttgaccacggcggacacctcacacatggttcaccggtcaacttctcaggctcatatttccatgtagtgccttacggagtaaatgacgagggcttcatcgattacgacaaggtagaggagatcgcccttgagtgcaagccaaagatgattatcgcaggtgcatctgcatatgcgagaactatagatttcaagcgtttcagagagattgcagacaaggtagacgcagtgctcatggttgatatggctcatatcgcaggacttgtagccgcaggacttcatccaagcccaatcccatatgcacatgtcaccacaaccactacacacaagactctccgcggacctcgtggaggaatgattctctgcagtcaggagatgcaggataagtacaatttcaacaaggctattttcccgggaatccagggtggacctctcatgcacgttattgcagcaaaggcagtctgcttcaaggaggcattacagcctgagttcaaggagtatcagaagcagattgtaaagaacgcacaggcactttgcaagggtcttcagagccgtggcatcaagattgtatcagacggcacagacaaccacctcatgcttgtagacttaactccgtttggtcttacaggaaagtctatcgagaagcttctcgatgcggctcatatcacagccaacaagaatactattcctaacgacccacagaagccatttgtcacaagcggtatccgtctcgggacacctgctgccacatcaagaggcttaaaggaggatgatttcgacaaggttgcagaggcaatcgccatgatcatcaaagagggcgagagcgcagttgagcctgcaaaggctatcatcaagacacttactgacaagtatcctcttgcattttaagggttttcagagtaaaatgttataagttataaaaacataatactttggaggaattatgatagacttaaagtttttaagagagaatccggatctcgtaaaagaaaatattaaaaagaaattccaggaccacaagcttgtgctcgtcgatgaagtaatcgagtatgacaagaaagccagagaagcacagcaggaggctgatgatcttcgtgcaaagaagaatcaggtttctaagcagattggtgctcttatggcacagggtaagaaggaagaggctgaggctgtaaaggctgaggtagcacagatttcaaagcgtctcacagagcttgagccgctcgagaaagagtatcaggacaaggtgcttgaggatatgatgaagattccaaacatcattgatccatcagttccaatcggaaaggatgataccttcaacgtggagaacgagaagtttggtgagcctgttgttcctgatttcgagattccttatcatacagatatcatggagagatttgacggaatagacctcgatgcagcaggaaaggttgcaggaaacggtttctattatctgatgggagatatcgcacgtcttcactcagccatgacagcatatgcgcgtgatttcatgattggaaagggctttacatactgtatcccgccattcatgatccgttcaaatgtcgtaacaggcgttatgagctttgaggagatggatgccatgatgtataagattgagggagaggatctctaccttatcggcacatctgagcactcaatgatcggtaagttcatcgatacaataaacgatgagtcaaagcttccatacacactcacaagctactcaccttgcttccgtaaggaaaagggtgcacacggcattgaggagagaggtgtttaccgtatccaccagtttgagaagcaggagatgattgttgtctgcaagccacaggattcaaaggaatggtatgagaagatgtggaagtacacagtagagcttttcagaagtctcgatgtgcctgtccgtactcttgagtgctgttcaggagacctcgcagatctcaaggttaaatcatgcgacgtagaggcatggtcaccaagacagaagaagtacttcgaggttggaagctgctctaacttaggcgatgcacaggcaagacgtcttaagattcgtgtaaagggcgaggatggcaagaaatactttgcacatactcttaacaacacagttgttgctccaccccgtatgcttatcgcattccttgagaacaacctgaatgcagatggctctgtaaatatccctaaggcacttcagccatacatgggtggtacagagaagcttattccgaagcactagtttttgaaataaattagttcatgtaaataattaatacatgtaaatataacagccgtagctgcgattgatcagatgaaagataaatcgtggttacggctgttttgtgataaaagataaatgccatattaaaaactggttgacacgatatataccgtgatatatactaaatgcaaaaggaggtgttctattatgttaacagctaagctatttgagaatgggcgaagccaggcagttagattacctaaggaatgtcgttttgaaggagacgaggttatgataaataaagtcggagatgtggtttttctaatacctaaagataatgagtgggcaggactgcttagtagtctggatatgtttacagatgatttcatgaaagaaggacgcatgcagccagaagtacaggtacgagaaagtttttaatgaaaaggggtttttatgaaatacatgttggatacgaatatttgcatatatgcaataaaaaataaacctaaggaagtaataaagcatattttatcacacaaatcagatgaattatgtatatcagcaattagctacggcgaattaatgcacggtgtggagaaaagcacgtatcgcgaaaaaaattatcttgcgctctctctgtttttatcatcaattacaattttacaatttgatggtattgcagcggaaaagtatggtctggtgcgtgctggacttgaaactatgggaacaccaatcgggccaatggatactttgattgcagctcatgctttgtcaaaagaccttattcttgtgacaaataatacaagagaattttgtcgtgttgctggattaaagcttgaagactggactattgcatgatgctacaataaaatttacagagaagaaaatcccttaccaaatacttcactggtgctcatcacagacataaaagcatgcagcttattctgatgtatgaagcttctaagctctatggcctgcttctttgtgagagtgctgaaaacgatatagtttctctcaccggtgtaagcacctcgtgcctccacatatgtggcacttttctccagcgtgttagtaatataatcgcatatcacatccttgtcatcgcagataagcattatggattttctgagcatgatattttcgatgattgcatcaatcataaatgatttcacaacaagtccgacaaatgaatacagagcagtctttatgtcaaatacaaagcaggcgatgataatcatgacgaggtcggtgagaaataaagccatgccaatattttctacatgtgcatatttttttacaatcatggcgatgacatcggttccgccacttgaagcacccacatagaaaagcagtgcagatgcgattgcaggaagagcgatggcaaaaatcagctcaagcattggctcgtttgagagcggatgagtgagtgggtcaagcttttcaagcaccagaagctcaacagataaaagtattgtggcataggtggtcttaatagcaaagtctttgccaaggaagaaaaagcccactacaagcaggagcatgttcacaatagtagaaaacatactcgctgagagaggtgttatcttcgcaaaaacaactgcggcaccggttacgccaccgaaggtgaagttgtttgggaacttgaaatagtatacaccgattgccatgatggtgatactgagtgtcattatcagaaaattttttatctgtttaagcatttgttgttctccttgctttcttttgtattattaatcgttcaaatctaaatatttatttgcatggatagtgtaggacgatgaatgtctgatgtcaatattatccgtgaaataaattataagtattatttctataaaagatatattatattagtaaaactaataagaataattacaatatataattggaaaatttagcactatgaaggtatactataggtattgaacgaattgcagattattaggaggaacaataatggattacaagaattcaggtgttgatatcgaggcaggttacaagtcagtagagcttatgaaaaagcacgtaaaggagactatgagaccggaggtgttgggtggtctcggaggcttctcaggagcgttctcacttgcttccatcaaggatatggaggatccggtgcttttatcgggaacagatggatgcggaactaaggtaaagcttgctttcatcatggacaagcatgatacaatcggaatcgatgcagttgccatgtgtgtaaatgatgtggcatgtgcaggcggtgagccattatttttccttgattatatagcatgcggcaagaactatccggagaagattgctacaatcgtaagcggtgtggcagagggctgtaagcagtcaggctgtgcactcgttggtggcgagacagcagagcatccgggtcttatgcctgaggacgagtatgaccttgcaggctttgcggttggtgtggttgacagaaaggatatcatcacaggcgagagtttaaaggatggtgatatacttatcggaatggcatccacaggcgtacactcaaatggattttcacttgtcagaaagattttcaagatggacaaggaaacattaaatacatatcatgaggagcttggcactacacttggagaggcacttcttgcccctacaagaatctatgtaaaggctcttaaggctgtaaaggatgcaggagttacggtaaaggcctgcagccatataacaggcggtggcttctatgagaatattccacgtatgctcatcgatggcaagcgtgccgtagttgagaaaaacagctaccctgtcccaccaatctttacaatgatggcaagagagggaaatgtcgaggagcagatgatgtacaacacctacaacatgggacttggaatgattgtcgcagttgaccctgcagacgtggacaagactatggaggctatgaagtctgccggagatacaccatatgtagtcggaaagattattgacggcgagaagggtgtagatctcgtataattacgtatacggctttgtgaggaaaaaaaatgaaaattgcagtatgtgtatctggtggcggtaccaatcttcaggccatcatagatgcaatagataacggaacaattacaaacacacagatagaggttgttataagcaacaacgcagatgcatatgcccttgagagagctaaaaaggcaggaataaaggcagtgtgtatctcaccaaagagctatgaaaacagagctgccttcaatgaggattttttaaagcagcttaactcatatcatgtggatttagtcgtactggcaggctttctggtagtgattccgcctgagatgataaagcagtacagaaacagaatcataaatatccatccatcgctcataccatccttctgcggtacaggctactatggccttaaggtgcatgagggagtgcttgcacgcggtgtgaaggtgacaggtgccacctgccactttgtggatgaaggcacagacacaggtcctattattttacagaaggcagtcgaggtaaagcagggcgacacacctgaggtgctccagcgcagagttatggagcaggctgagtggaaaatcatgccgcacgctatcgacctgatagcaaatggcagggtgtcagtagaagacggacatgttattatagatgagaagtaatgacagtgctgtaaataattattatgtaaccacagacagattatgattaccggacaatgaaaagcttatatatagcttaggtataggaggcaaaaatgaaggtattagtagtaggaagcggcggaagagagcatgcaatatgcagggctgttgcaaagagcccacgcgttgacaagatatactgtgcaccgggcaatgcaggcatcgcagcacttgcagagtgtgtgccaatcggtgcgatggaatttgataagctcgtatcatttgcaaaggataatgccattgattttacaatcatcggtatggatgatccacttgtaggaggtatcgttgacgagtttgaaaaggcagggctcaagtgcttcggaccaaagaagaatgcagcaattcttgagggctcaaaggcattttcaaaggatctcatgaaaaagtataatatccctactgcggcatatgagaattttactgatgcaaaagaggctcttaaatatttagagacagcaaagttccctatcgttttaaaggcagacggacttgctctcggaaagggtgtacttatctgtaatactcttgaggaggcaaaagagggtgtcagaaccatcatggaggacaagaagttcggaacagccggaaacaccatggtagttgaggagttcatgacaggccgcgaggtttctgtgctttcatttgtagatggaaagactatcaggattatgtcatctgcgcaggatcacaagcgtgcaggcgatggagatacaggtcttaatacaggcggcatgggcaatttctcacctagtccgttctataccaaagaggtcgatgatttctgcaagaagtatatttatcaggcaactgtagatgctatggctaaagagggcagaccttttacaggagtaattttcttcggactcatgctcacagaggatggaccaaaggtgcttgagtacaatgcgagattcggagatcctgaggctcaggttgtgcttcctcgtatgaagaatgatatcattgatgtgatggaggcctgtgtagacggaactcttgacacaatagatttgcagtttgaggacaatgcatgcgtatgcgtagttctggcatcagacggatatcctgtcaagtatgagaagggctttaagataacagggtttgagaagtttgacggcaaagaggattattactgctatcatgccggcaccaaatttgatgctgacggcaatatcgtcacaaacggaggacgtgtgcttggtatcactgcaacaggcgccacactcaaggaggccagagccaaggcttacgaggcaacagagtgggtacagtttgataataaatacatgagacatgatatcggaaaggcaatagatgaagcataagggtattatttttgatatggatggaactctttgggattctgcagagaatgtggcaaaatcatggaataaggccatagcagattatggctatgagagagcacctatcacaaaagaagacatgtattcagtaatgggaaagacaatggatgtactggcatccattatctttcctaattgtacttgcagagatgagttaattaatgtatgctatagggaagaaaacgattacctgaccgctcacggaggagagctttatcctgatgtggaaaagacacttgatgagctgtcagaaagctatgacctttatatagtcagcaattgtcagcgtggttatatagagtctttttttgcgtaccacggacttggcaggttttttaaggatattgagtgctacggcaacaatgagcttgagaagtcagaaaacataaagcttattgtagagcgcaataatatagatgaggcagtgtatgtaggtgacatacagggagactacgattccagcaaaaaggcaggagttaagttcatccatgcagcatacgggttcggcacaatagatgacgatgtgcctgctattcgcaaattctctgagctgccgcgggtggctgacagagtatttgaggaaattgaaaagcactgataagaatttagtttgaagaaaagtttatgaatatgttgtagataatggggtttccgcatggaagataagcgtaacagagggagaagaattacagatagaataacagaggcttactatgagctgatgaagattgttgcagaaaacaatcatgagcgcatgtttgagtactatgtggaagatgatgaggcatatattttcaaaattgtcaactcttttccggctcaggagacagcatatccactttttaaacaaaatattgacacatacatgtcagagtgtccggaagacagcatcgaatgcttcaaaaagcagctcgataaatgtctgcttcggcctatgcgtactgcattccagcttagttttatatcagaggatggcaagagcaagccggttgagatgtacatggtcagcatacctgatctggataaaaaggtatgtatggtagttggagtaatgtttgatatcagagatgaaaaggggcttttggactcgctgacaggcacatacaatcaccttgcatttgagaataaatgtacatcacttatcaggcaaaagggaacaaagcttttatttgtgatgcttgatgtggatgatttcaagatagtaaatgataccctgggacacaatgtaggggatagggtattaagccagacaggacaggtgcttaaggaagcagttggagccaatggtatagttggcaggcttggcggtgatgagtttgcagcgattgtatttggattagaggacagtgatgctgtggacgagttctgcgtaaagctgtcaggcagactgaagaatattatctttgatatggagtattctgcatcaatcggcatgactaccggcgatgacagagagctgacctttaaggatctgtactatgaggcggatcaggctatgtattactcaaagaggcagggaaagaatcgcatatcgtttttcgattctatcaggaaaaatggtataaccgttccgcataattcctgcgctccttccaatacagatgtatcctgtaagctgtcagatatggagatattctcgtatgatgaaatgccggactatatacttgcagtagatgaggagagccgtagaatagtatttgtcaacaaggctatcagaaattcaagcgttatgacagcatctcagattgatgaatttatttcaaagccgtttgatgatgggttcattgatttgtttttacggaaaaaagagcagggaaacagagtgtcggttttttcaggaaaggatcatcccgacaatatagttgcaaagcttttaggcgaaaagaagcttataatcaagctgaatcataaggattataatggctatagactgctcatgatgatagatttgagtaatgagtcaaagcttaatgctgttatgagacagataaccagctacaggtcgtttatgaagaatttcattgatgctgttaatgataccaccgaaggcttggggtataagaactatttacggctgcttagagagttttataatgcagattgtgtggctgtcatttataatggagagagtgcgtgggacacaattgaagagatacatataccaagtgctaagattatggcaaaggtggttaatgaatctgtttcaagaggtgcaattacagattttctcgctctgtttaatgacgctggccgtgtgtttataagtgatattcagtcaattgagggtgaatacagggatttattcaagcgtatggctgatgtcagaatatggtctacatctgctgttcttctaaacaagagggaacaatgctttggtgccatcgtggttatgaatccaagagccaattcaggaagtctggatttgattgaaatgatcggtatttcaatatcgaatagtctgttttatgagaaggcgagggcagagtatgagtacaggctcaattttgaccaggtcacaggcttaagaaagagagaaacctttaataatttgggagagagctatgtggagtatgactgcagctttatgggagtatttgcatcagatatcataaggctttcagatataaatgaaaaatttgggtatatggcaggaaatgcgcgtcttaagatggttgcagatgtgatcaggggcgtttttacgggctatgatatatacaggtacgagcaggatgagatagttgttttttgcaaggatattgataaaaaatcatttatgggacttgtcaggatagtaagggaaagccttgatgatctggatttctcagtatcgacaggctttagttggacggacaagcccgacatagcaaggcagctctcagaggttcgcttaatgtatgatattgaaaaggatgcaaagcttaagagtcttgacagtacaatgagaaataaggtatttaaggatgtggtttctgagattgaaaagggaagcttcatggtgtattatcagccgaaggttgattcaagaacaggcatcacagtcggggcagaggcccttatcagattttttgatgaggctcatggcattgtaggaccaattcattttatcgagattttagaagaaaacagatgctcgcatcttattgatttatttgtacttgatgaggtatgcaaggcgcagaagcttcgctgtataagtgacaggagagtggttccggtatctgtgaatttttcaaaaaatacactggaatatgcagacctcctggatcaggtgaaggagataatgaacaggtatgatctcccggaggggcttgttcagatagagataacagagtctgttggtgatatggatattgtattgataaataatatcgcgcagtcgctgatttcaatgggctttcgtctttcgatggatgactttggcacgaagtactcaaatcttgagatgctctttaagtttccgttcagcattgctaaaattgaccgttccctggtcaagaatctcgagagcaatgagaagagcaggatcatgttaaagcatctcatatccatgattatggagcttggcatagagtgtgttgccgagggggcagagaatgaggagcaggtaaggctattacagcagtttggctgtaatattattcagggctatttctattcaaagccggttacacttgatgttttcacgagtgagtttgtggaaaaaacaaggaatcaattgtgattcacaattttatatataatgcagctgttaacaggcgcctgtagcaggaaagcggataatagctgcaaaaaaagataaaaggaaaggaagagaaatgttagaaaaaatcttcaaactcaaacaaaacaacacaacggtcaagacagagatccttgccggtctgacaacattcatgaccatggcatacatcattgcccttaacccaaacctcctcaccggatttggtgctgagggaacaaaagcactatggaacggagtgttcctggcaacatgtattgcttcggcagtcggtatgtttgtcatggcatttcttgccaacaagccatttgcactggctccgggtatgggacttaacagcttctttgctgtagtagttgccaatatcgtaagcatcacaggcctgtcatatgttgattcattccaggctgcactgtgtatcatccttattgagggtattttattcttcatactttcaatattcaatatccgtgacaagatagtagatgccattccttatggtgtccgcatgggtatttcaccggctatcggtcttatgcttttaaatatcggttttggctcaaatgccggtgtttattcaaaggatggtggaccattttatgtgatgaaggatttcttcggtgcactcacaccgggacttgccaaaacaaatatgacagatggatattcttcaatggtgctcactgttgtgactatgttcatcggactttttgttatcattattttagctcataagggcgtcaacggagcagtactttttggtatgcttgcagcctgcgtagtttactgggcagcagaggctatattctttggaacaaacccatttgcgtcacttgcaacagcttcatttgtgccacagtttaaggatatggcagatacaacactgttcaagttcgatttcaaggatttcatcagtattggatggtttacagcaatttcactcatcatcacattctgtatcatagatatgtttgataccatcggaacacttgttggtactgcatcacgagcaggaatggttgacaaagagggaaatatgccaaacatgaaggaggctttgatttccgattcagttgccacaatggttggtgccgtaacaggtacatctacagtaacaacttttgttgagtctgcatcaggtgtagaggccggtggacgaacaggtcttacagctttcacaacaggtatcctgttccttgcatgcatctttatagcaccgcttgcagcaatcattcctgctgcagcaacatcatcagcacttatctatgttggtatcctgatgcttggcggtcttaagaaggtggatttcgaggatctctcacaggttgctcctgtagcactcatgcttattgcaatgcctatctccggatctatcggacatggtataggtctaggacttatcacatatactgtactcaaggtctttacaggaaaagcaaaggaggtttctatccttacttatgctatttcgcttcttttccttgtgaagttcttccttgtagtgtagtgttttaaagcttagtgattcatagtggttcataatggttatagtacgaaaatgccactacagcacagtttaatgcatccgtaagccggtactgcgtcactaagaggctgtaagaattatatattcagtttgttatagaccatgacacaaccggcttttatgtgccgtccatggcacataacgccttgccccgccatccttggcggggcattgttgtgtgcggatataattctaacagccactaagtgactgcgtaaggcttgcagatacattaaactgtgctgtagtggcattttcgtatgtagtgacaataaattatatatacaaacatatgttcttgacatttaaacataatccatgtaaaattataatatggacaagcataatgaagagcacatttatgtggcaatagatttaaaatcattttacgcatcagtagagtgcagagagaggggaaaggatgctctgactactaatctggtcgtggcagatccaacccgcacggagaagactatctgtcttgcagtatcgccggctcttaaggcatatggcataccgggcagggcgcgcctttttgaggtggtacagcgtgtgaaggaggtaaacaagctgcgtctgtcgaagcttatggcgagtggacatgctgccgggacagtggagagaagaaaaaaatatgtaacagaaattgatatagcagaaaatgatataacagaaagcacaatggccggctttgattatgcatcatataatgcgaagctgcttgacgcacatcctgagtatgagctgacatacattgttgcaccgccgcgtatggctttgtatatggattacagtacacgcatatacaatatttatcttaagtatatcgcacctgaggatatcagtgtttactcgatagatgaggtttttatggatgtgacacactatcttcgcacttatcacatgacggcaagggagcttgcgtctaagatgatagacgatgtccttaaggataccggtatcacggcaacctgcggcattggtaccaatctgtatctgtgcaagatagccatggatattatggcaaagcatgccatgcctgatgagcgaggagtgcgtatagcagagctcaatgagaatagctataggcgaaagctatgggaccacaggccgattaccgatttctggagagtgggagcaggttatgccaaaaagctcgaggcagccggcatgtatacaatgggagatgtggccaggtgctcaacaggcggttcgaatgatttttacaatgaggaaaagctgtataagatgtttggcatcaatgcagagcttcttatagaccatgcatgggggtatgagcctgttacaatagctgatatcaaggcatacagaccgcagaccaatagtatcagttcagggcaggtgcttcaggagccgtatgattatgagaagacaaagcttattgtgcgtgagatgacggaccttcttgtgcttgatctggtagataagaggctggttacagaccagatagtactcactatagggtatgatattgcaaatctgtctaagaagactgatagctgttttggcaataattatgaccacgcagtaaataataaaggcagagacagtattggcggtaaaaaaggtacacacagagattatacaggtgagattaccatagaccgatacggcagaaaggttccaaagcatgcacatggtacagcaaatttagggcgttatacatcatccacgcgcatcatcatggacgcggtgatggagctttatgaccgtatcatagatccttctcttctgacacgaaggattactgtggtggcaaacagggtctgtgatgagagcaaggtgcaggaaagtgagcagtttgagcagcttgatttatttacagattatcaggagaaggctaaggaaaagcagaaagaggatgaggcgctttccaaggagagaaagcttcaggaggctatgatttccgtcaagaagaaatatggaaagaatgccatgctaaagggcatgaatcttgaggagggtgccacaactatttcaaggaacaatcagattggcggacacaaggcatagcagcaaccgctgtggttcttaatcggatttttttagtggtttaaaatagttacgaaaaagtatataaggagcatggcatgggaaaatatgatgatattatagatttaccacatcatgtgtcaaaggtacatccgcagatgtctatatgggaccgctcagcacagtttgcaccttttgcggcacttacaggtcatgaggaggctattgcagagacagcgaggctgacaaatgagtggcatgagcctgatgaggacaaaaaaagagagcttgatgagaaaatgaatgagctcatgatgctttatagaaagcgtaatttcaattcagacagtttatatgacgaaaatgtcataaacacaatgacagagaattattttgaggtgacatattttgtgccggatgagcacaaggagggtggcagctatgagcatgtgacaggatatcttaaaaagcttgatagcatagggcacctgatgatagttgtggatgataatggtagagagacggtaattgatacaagaagaatatatgatatcgatttgtgatgattttgttaggaatgcattacttgtaaatgtggtatagaaagcaggaaattataaagatggacaagcagatagaaatagccggggatgacaataaaaataatattggtgtgttatatggcatcggtgtaggtccgggagatcccgagcttatgactttaaaggctattaatacaataaaagcatgtgatataattgcaatccctgcagtttcaaaagatgaatgctatgtgtacggcatagtgccgtcgttttgtgcagctgcagcgcggcttggcatttcgcttggtgagatgatggatgagatacatatcataccggcttcgtatgatgtgagggatactgtgggctacggtggaacctgtgtatacatgaaatccggaaagaagcttgcagagcttatagaggtgcttcgcacaggagatgctatcagaaaaaagaaaatgacagtgtatggtgtgacaaactgtggcatggagtctgagcgtgtgtacagggggctggatgagcttaccgaagcaaaaggatatctgacaatagttatagtgaaatatagctaaaatgggagtttactttttgtgcacaattgctataatagtatagtgaaccgaatatttatatatatatatttgaatatagaaaagagctgaaatatcacatgagtatagtagataaatttggagaaaaagtaggcgagatagcagaaaacgatcctgtcaaggcaaggaagcttttacttgcaggatatagattacaggaaaaaagattagcattatttccggacagaaagcttccaatgtcagggcagtatgtggcaaagattgtcatgaataatatcatacaggcacttgcaaagcctgaaaatgccgccatggtcagtatttttgtaccgggtgagcttttgacggcggcaggtctcacaccgtattcggttgaggcattatcgtgttttatggcaggaactaaatgtgagcagacctttctcaagcagactgagaaggaaggctttccggaaactatgtgctcgtatcacagggtttttctgggcgcagcattaaatggtatagtgccaaagccaaagtgcatggtgtatacaaacctggcatgcgatggcaatatgatgacatttccgtatctaaaggagagatatgaaataccaagcttttatatagatgttccatatgagaagaattatgactctgttatgtatgtagcaaagcaacttagggagcttaagaattttttacaggatgtcaccggaagaaaaatcacagaggagtctgtgaaaaaggctgtagataagagcaaaattgcatcaaataattattacaggcagcttcacctgagaaaaggacatgatattgcgtcaactctcacaaatgagctgtatgcgcttttcatgtgtcatctgcttgcaggaactgatgaatcagtcagatatacacagcttctgagagatgatgtgagacgtgcaccggcaggagatggctttcatgtactttggatgcacaccatgccgtttttgcaggatgcagtgaaggatgtgttcaattacagtgatacaatccatatcagtgcaagcgattttatagcggatggtttcagaagcatggagtcggatgacccatacgaggcacttgccgaaaaaatggtttactgcatttataatggcagcgtgaaccagagaatagaggaggcaaaggagcttgccgacacagttggagcggacggtgctgtactttttgcgcactggggctgtaagaatacaatcggtgcatcaagccttataaagcgctcactcgagagggaagggcttccaactatggttttagacggagacggctgcaacccggcaaatgccagcgatggacagatttccacaaggcttcaggcatttgtggagatgcttgcagagcaggaacgtaattagaaataatacaccggttattgtgtgtggtgtgtggatatttactataaaacaatttcagaaagtggaaaacagatgataaattatgtttgtaaatatgctccggtagagttgtttaagggctttgggcaggaatgtgctgtgcttgaggagatgccggagaatttcgataaatcagataagatagctcatgcgaatctctgtggattcggcaaatcagtcatacaggctgtgctcgagggcaaggtagaggagcttgtgctcgtgaactgctgtgattcaatgcgcagagtctatgatatcatagagaatacaaagaaatgcaaattcctgtatatgcttgatctgcctcatgaggataacgagtgtgagaacataaaatttgcacagtcaattcttcgtttgaagaaagcatatgagagatattcgcacaggacattcgacagggagctttttataaagtcgtttgcaaaacctgaatctgagcgcaagccatacataggtcttatgggtgtgcatgtgagcagtattcttgagaagacaatacgtgaaaatatgcagatggatgtggaaaatatgacatgcacatccggcagaaatctcattattttacagaaggatcttagaaatatggatgatgaggctctctttgtagcatatgcagagagtctgctcggacagatgccatgtgccagaatgaacaataatacaagaagaaaccagctctttttagacccaagtcttaagggcatcatatatcacacgataaagttctgcgattactatggttttgagtatgcaagcataaagaataatattaaggtgcctcttttaaagcttgagacggattttacaagccagagtgccgggcagcttttgacaagaatacaggcatttgcagagacaatagagggctcagatgacatggaccctacaaaaggcataagcgaggaggcaagaagaaggatggaatcaggagtctactatgtagcaggaattgacagcggctcaacaagcaccgatgtggtgatactggatcaggatgggaaaattaaatcgacaatgattattccgacaggtggcggcgctatgatgagcgccgaaaagagtctggagaaggctgtcgaaaaggccggtatatcaaaggatgatattgtaaggattgttacaacaggatatggtcgtgcatacatcaacagcggtgatgacagcatcacagagattacatgccatgcaaagggcgcgcattatctgaatcccaacgtgcgcacagttattgacataggtggacaggatataaaggcaatcagcatagatgaaaatggtgcggtcaaaaatttcctgatgaatgataaatgtgcggcaggaaccggacgttttctggagatgatggcaaggaccctcggactttcacttgaggagatgagcaccatgggacttgagtggaaggaaaacattgtgatttcaagcatgtgtacagtttttgcagagtctgaggtagtatcgctggtggcacagaacaaggctgtttctgatattatccacggactaaacatgtctgtagcttcaaaggtaggcgcacttgcagcaaggcttgggcaggataatccgggagagtatatgatgaccggcggagtggcaaagaacaaaggcatcacaaatgcacttgaagaaaagctcggcgcaaagctgtatatctgcgatgaggcacagctttgcggagcgcttggtgcagcactttttgcatatgagaagtgcagggaggcttaatagagggctatagcaaaccaccagttgaactggtggttgctgacgttactccatgattttcccgtcaatacttattgttacaacttgccatggtatgaattttccactagcttgaagcgcttttttggccgcaatttccaggccgccacagcaaggaacttccattcggacaatagttacactttgaatgttattattttgaataatagcagtcagcttttcactataatccacctgatctaatttaggacagccaattaaagttaccttgtttcgaataaaatcctgatgaaaggcggcataagcataagcagtacaatcagctgcgattaaaagctttgagccgtcaaaatatggtgcattaacaggagcgagtttaatctgtaccggccagttctgaagctttgatcctgaatctgcggttgaagtggcttttgcaggctcagatgtttcagttcgtctgatctgcatgattttagatccaggacagccggagtgagaggtcattgcccggtttttggcagctattttcttctgtgcttcttttacggcttcttcatcatatgcaggtgcttctctctcctcaaatgagatggctccggtagggcattcagggagacaatctcctagtccgtcgcagaaatgttctctcaccaattctgcttttccgtcaatgatatcaatggcgccttcgtggcaggcagatgcacaggcaccacagccgttacatttttctttatcaatctttataatctttcttatcatttttaacctccgtcaatagtatttagcgtttgtttatgctagaattatagtattataaatacaactagtatgtttgatttccaacagggaggaactattttgaaaaaatatttaccaatcctaagaaacagtccattttttaaaggtctaactgataacgagatattatccatattgcattgtgtaaatgcaacaacaatttctaaaaagcgagattcttatattttcagagcaggtgatattaccgaagtaatggggattgtggtgtccggctgcgtcctcattattcaagaagacatctggggacatcgaaatattttgtcaaaatgtcacgcaggagatttttttggtgagccgtatgcagcaagccagagagctgtcttaaatatcagtgtggtagcagatgaggattgtgagattattctcttaaatgtcaaaagacttctgattacctgtccaactgcgtgtgagcatcatcagaagctgatccgtaatctggtcagtgtcctggcaaataagatactgattctgaacgataagatcacacatgttgggaagcgaacgacgagagataaactattatcatatctgtcggcagaatctatcagacatttgtcgttatcttttgatattccttttgataggcagcagctagcagattatctttgtattgatcgtgcagcaatgtctacagagatatcaaagttacaaaaagagggctttataaaaacaaatcgaaatcattttgaattgcaattgagtataatcaaaaagaagaactatacaatttaggctagctgtagaaatgaagccaggtgactgcatcaatattccggcagaagtgaaacactggcatggcgcagcactggatagcaccaagaggactatttttttgtgttagcgccacttaacgattgtgggtgtcaaaacacccgtttagtgatataataaactctgtatattcattaaaatggaggtgcttatcatggcagtcccaaaagttgacggacaatttatagcagaggctattaaatatattgatgagaatggagttccttggcacaatatgagtaccaagtatgagcttgtatgggaaaacggtaatacctatccaccaaagtatgtcatcgcagtagcaaatcatttgcagaatggtgcagagatagatgtatctggatataatgctgtcgaagcaaaaaactatcttactgcaaaaggatatgagattcagattaagcagacaaaatacgagattactataacatcagagtctgttacttctactgatgattcattcactatggataatattagtgcaggagatgtgttcaagccgttggatgcatcatttgtttctgccaatggaactgttatcaaaagaaaatatgggaaaggtgagagacggaatacaaaccaaactttaccacgtattgcgtttcaaatttatgaaaaacagattgcagccttgccagtagaagaaaaagaacagtttccaatttgtcaatacgctccagataaggaaatgattcgtggaatttattacagcaaggacgaagcaaaagcacacaatatacatccgttcaatacaatgtcgtatgattatgatggtggcagacagtttgtaatttattcatggaatatctttacaactcttagatttgttcaggagtgtttgacacgtttcggtaatccgggagattccttcaaattagtttatcgtgagaaggacgagaaggaaaaggcagcagttgtagaggaagtaaaaccagcagaatttaatggctatctgaatccatattcgactatgcttgtggaatctaagaacattatattccgaggcgctccaggaactggaaagacttatcttgcaaaagaaattgctgctgacattattagcaatggctattttgatgattatacgatgctcacagatgagcaaaagcaacaggtagagtttgtccaatttcacccaagttatgactattcggattttgtagaaggactccgtccaaagacgaatgaagatggttctatgggttttgaattgcaggatggcgtttttaagaaattcgtggataaggctagaagaaactatgagaattctaaaaagtccacagaggtcattgcaaatgaattatctgttcaagaagcaatgaaagagttctttgatgatgtggacacaggaaataatacattcaagaccaaagcgggtacagaatttacaatcacagatgtcgatgatgagcatatttatctttcaataccacaaaatgcatccatcaacagtatccgattgaatatttctgaaattagacagatgttagagtctggaagagaatttaacaaattaaaagatattacggaatttttcaatatcaattttacacagcagagatactcctacaaccttgttatttttaacgagattcagaaaaagaaaaagactgcaaagattataagacaggaagagttgaagaaatatgtattcataattgatgagataaatcgtggtgagatatctaagattttcggagaattgttctttgctgttgatccaggatacagaggtgtggcaggagaggtttccactcagtatgcaaaccttcatgctgatagcaatgaaaaattctatattccagataatgtttatatcattggtacgatgaatgatattgacagatctgtagacagctttgatttcgctatgagacgaagattccgttttgtggagcttcgtgcagatgagcgccttgagatgcttgctaacttgaacaacgaagagaaagaggctgaggcaattgccagaatgtcagctttgaatgtggaaattgcagcaacagaaggtctgaatgaaaactatcagattggtgcatcctatttcttgaagctgaagaatattgactttgaccagttatggtcagattacctacatccgttgttacaggaatacataaacggtatgtatgatgaagaaggtattatggagcgatttaagaaagcatataaccaaggaaagtcggatggagctgatgtagatgagtcgaattaaaataaaagataattcgagaatacctaaggagtcattgtctggcatatcacttctgacaagcaaaattgcagataaaactttggagcagttggagaaagaagggatatttgtattcccggaaattcttagagatgcagatgatatcacaaaagaccagatgattttacagagtgtaaacaattattatttgtcgagcaatgtcatgggcttcatgggacttggagatgagaagcttatagttgaatcaagatttagtagcaacgggcaggacttcctgtttcaatatttgcttgagagagtatttgatgtcccgaatattgtagatttggaaacagatgcgaacaatgatgatcgtgttttcaatctgcttgtttttatcttcccacattacttaaagagtgccatgcgtaagggtatctttaagacttatgtgagaaaaacatacaatgacagcaatgttaagggaacgatagatatagcgagacacattgttaagaatacaccgtttgttggtaatgtagcatattcgcagagggagtattcctttgataatgatttgatggaattaatccgtcatacagtggagtttatcaaacacaagccatacggacataaactgcttgcacaggctaaggatgaggtcaaggatgttgtagcggccactcctaactacgagatgtgtaaccgacagaagattattgatgcaaataagaccaataccattagacacgcatattaccgagaatattgtgaactgcagaacttgtgtctacttatcttacagcatcagaaacatcagattggaatgggaaacaagaaggtatatggattgctctttgatggcgcatggctctgggaagagtatatgaattcgattgtggacgagattttctatcatccgatgaacaaagctacaaaaggttctcagcgtttgtttgaccataatcgcggacttatctacccagacttcataagcagagactcagagacacgagtgattgcagatgcgaagtacaaaccgattgataatattggaaacaaggactatctgcaagtattggcatatatgttccgatttgatgccaagaaagggttttatttttatcctgaaatgggagaggaagaagatgctgttatgtggctcaaccgtggttcgacttatgagaagaatgtagaggctcgagaggatatttgtctcatcaagcacggatttcagattccgaccgagatagatgtatatagtgctttcacagagcagatgcgatgtaatgaaatcaaattccttgaaggaattttaacgtccgtgaaataggaaaaatataccttttaacgatgcaccccctcggtttagaaaactccaaaggggataatcatttctcggctttttat

SEQ ID NO: 1498 - DNA, 33885 bp, Unknown
  gut microbiota DNA sequence
ataattaaattcccaagtgagcaccgagaaaccggtgcaatacgaccttataatcattttcaccacaacgtaaggtacgcgcgccccgggcaccgatggcgcacacgtactctccggcaggcgcatagcgtagcattttagatactgtcagaattatgcccatgaaacgcagaaacgctcctgcaaggacgcaggagcgaggagaaccgcgccatggacggcgcgtttcgacggtttcgtcaagcatagaaaccctaaaaagcataattcatacagtatcttaactgtaaagcgtagcctgcaggagagtacgtgtgcgacacccggtgcccggggcgcgcgtaccgacctcagtcaaaaaaatatattataatattatattacgtaaaaccagctcggatcagtctccatctcgctggccacaagctcctttcgctctccggttctgatggaaagctcttggtttttgatgctgacacgagcacccggctctatagaagaagtaataaatgcattacttccgatgacagcacctcttccgatgacagtttcaccacccaaaatagaagctccggcatagatgatgacattgtcctcgatagttggatgtctcttcacgccctttagcttctgaccacctctggtagagagtgctccgatagtcacaccctgatataccttgacattgtcaccgatgatagtggtctcaccaaccacgattcctgttccgtggtcaataaagaaattcttaccgatagtggcacccggatggatatcaataccggtcttgctgtgtgcatgctctgtcatcatacgcgggatgagcggtactcccagcagatgcagctcatgggctatacggtttgtagtgattgcaagcagtcccggatagcaaaggataatctcattgtaattgtaggctgcagggtctccgtcaaaaaacgcggccacatcagtctccaccagagccctgatttttggaatccttttaaagaaatcattgctgattttctcagacatattgacgagctcgtgatgtgataagctcctgtatttaggattctgtggcagggcaagcaccacctgcttgcgcagattgtacatgatatcctccaaaagaacagcaatctgactgtccaggttgtaatatctgaagctcgtgcccttgaaatagcccggatacattatcttaataagctttgagagcagatcacaaacagcctccttgtcaggctgtgaaaaaagagcctgctgatttatgattttgtcatcatgatagtcgtcaagtatctgtgatacgagttcctctatcatttctttgttattgttatccatatattcgaagcctccgaatttgctatttataatatttttttgcctccatacgctcctcccatgtgcggtttattataccgccaatgaaaagcacatacatgcaaccatataaccataccattataagcgcaatagtggtcattgtgccataaaatgaagaataattattgtatttatccacgtacacagaaaagattccagagaaaatcatccatgctgccgccgcaaatactgctccaggcagctggtactttgccctatgcttcttgtttggcagaaacacataaatcacccagaaaaataaaataagcaccggcatacagattaccaggcgatagtcaaccacactgcctattatacttccaattatatgatgaatattcgaaaaatacatcttcctgagcttatttccaaacaccatgatacccagtaaaaaaaggagcgccagtgcaaaaacgatactgtaaaacaccgaatatatgcgccgtaaaataaaatttctgttttccttcacatggtacatatcgtcaagcccaagctgcaacgaaataaatgcctttgagcttaggtacacggcggtaatcatagtaattgaaagtctgcctgtaccgcttgcatacatctcactggccagatccttcataatgtcgccaaacgactccggaataaatgagcttgcccacatcagaaaatcagcctctgtgagcggtgtccagctcagcagtgaaaagaaaaacaataaaaacgggaaaaacgacagcatcaaaaagaaggctgcctgccctgcgtatgcagaaatagagctctctgaaaaattggtcacaaaatcaaaggctgtcacaatgatatcccatcttcggctgtatttcctcgcactttttccttcgatgttagattccttacaatcacaacctacagccttacttttctccatttttatttccagtgttttactatctaaatcctgtctattttgctttgtcatctgccttcttctggaatttctcctcaaaaactataaaacgctcatgtgtaccctcaccaatgagacctgcctcatcaaaagcctttacagaaaaagtgagtgctctgccatccaccttcacaagctccgactcacaagtcaccttcatgccaaccggtgtagccgaaacatgcttgatatcaagcgcagtaccgacagtaccacttccctcctcaagctcagacgcaacactctcaaaagctgtattttccatcagcgcaatcatagccggagtagcaaacacatccatcgtgccgcttcccatagcttttgctgtcttatccaaagtcactgtaatctctttcttacctttaatacctgcctgtaacatatcagtctccttatatctatattatgatatgagggtcaaaagatattttgcacctcatttatgaaataaatcctagcatttttacgccataatgtccagtaaaaaataagtttataaacttttcacaattacaaaaatacccagttcatgcggttttctgtcattttgttagcactcactatttttgagtgctaattttctattgacttttccgacaatgcgaactattattctattatgcttatataacaagctggtttattacaaataataaatgacctacactcgcggaaataagctaaattgcaagtagcagacagttgttccgaagataaaatatgaactgccgcagggttccattaccgaacaaggcggcacaaccaaaagcatgccacaaactatccatacaaaatcctgtggctgacttcatattttctctgaggaattattggctgatacgttgcaatctcacagcccatagccgcggtgtaaaacatttaactaaatctacactcgcggaaataagctaaaattgcgggtagcagacagttgttccgaagataaaatatgaactgccgcagggttccattaccggacagagcggcacaaccaaaagcatgccacaaactatccatacagaatcctgtggctgacttcatattttctctgaagaattattggctgatacatcgcaacctcacagcccatagccgcggcgtaaatgtaaataaaaacaaggagtgtgtaaaaatgacagaaaaacacggcaatctttcaattgacagcgacaacctgttccctattataaagaaatggttatattcagaccacgatatcttctatcgtgagctcatctcaaacggctgcgatgccatcaccaagctcaaaaagcttgacatgatgggtgagtattcccttcctgcagactacaagggcaagattcaggtgcttgtaaaccctgacgaaaagacaataaagattatagataatggtcttggtatgacagccgatgaggttgaggaatacataagccgtatcgcattttcaggcgctacagacttcatcgagaaatataaggataagtcaaatgatgaccagattattggtcatttcggtctcggcttctactcagcattcatggtagctgacgaggtaacaatcgatactctctcttataaagagggctctacacctgtacactggtcatgtgacggtggcacagagtacaatatggaggatggcgacatggacgatgtcggaacagagattactctctacttaaacgacgactgtcttgagttcgcaaacgagtaccgcgcacgtgaggttatcgaaaagtactgttctttcatgcctacagagatttaccttgcaaaggaaaatgctcctgaggagtacgagacaatagacaaggctgacaagcgtgacactgacactgtcattgaggaaatccatgaggacgccaagtacgaggaaaaagaaaatgataagggcgagaaggagcaggtagaggtatctcctgcaaaggataaactcaaaatcgttaagcgccctgttccgcttaatgatacaaccccactctggaccaagagcccgaatgagtgtaccgatgaggaatacaaggagttttacagaaaggtattcttagactacaaggagcctcttttctggattcacttgaatatggactatcctttcaacttaaagggtatcctctacttccctaagatcaacacagagtacgactcaattgagggaactattaagctttacaacaaccaggtatttatcgcagacaatatcaaggaagtcattcctgagtttttgatgctccttaagggtgttatcgattgtcctgatttacctcttaacgtatcacgttctgctctccagaatgatggcttcgtaaagaagatttctgagtacatcaccaagaaagtagctgacaagctcatcggtatgtgcaagacagataaggaagcctatgagaaatactgggatgacatcagcccattcatcaagtttggctgcttaaaggacgagaagttctgtgacaagataaacgactatattcttttcaaggacatcaatgacaagtatcagactcttccggagctgctcgcacctgttgcggaggatgaaaaaacagatgcagaaagtgccgatgcttctgatgatgcaaagaaagctgacaatgctgatacaaatgcctctgatgaaaacaaggagcctgagaaaaatacagtttactatgtcacagatgtagtacagcagggtcagtacatcaagctgttcaaggagcagggcatgaacgctgttatccttgaccacaatatcgatacctcattcatcacacagcttgagcagagaaatgaccactacaagttcatgagaatagatgcagacctcacagagtctctcaaggatgaatccggtgcagacctcacagaggcaaccactactctctcagatgtattcaagaaggctttgaacaatgacaagctcactgtaaaggtagaaaaccttaagaatgcagatgtagcatctgtgcttacactctcagagcagggcagacgtatgcaggatatgatgaagatgtacgcagccggaggcatgggtggaatggatccaagcatgtttgccgctgaccagacactcacattaaatgccaacaacgagcttgtaaagtacatcttagacaataaggattctgagcacgttccaatgtttgctgagcagctttacgaccttgcaatgctttctaatcagccgctttcagttgaccagatgactaaatttgtaaagagaagtaatgatatcatgcttcttctcacaaagtaatccaacaaagtaattttactgttaacatctcataaaaaagctgtacactatgcaggtttcatagacctgcatgtgtacagctttttattaattaccggctctcttaaacaaaaagttcacaaacactgccgataccactccaagcactgctcctgccaggatatccgttgggaaatgcatgaagttgtacatacgcgaaaacgctataagtaccgcaagtacaatcgccggtattcccattcttttgtctataaacataagtgtcactgccgctgttatgccgtttaacgtgtgtcccgaaggaaatgatgagtcaaacggtatctttacaataagactgactgtctcatctatctgacatggtctcaatctgtcaaccatattttttattatcagattgcccactataaagctcaaaagctctgccgaaagcatctgcatgcctccacggcggtatttttttgaaacacaaagcactacacctatcacaatccacaatgcgcctgcatttcctatggtggataaaaacgccattagcttgtctaaaaatggtgttctgatgctctgaattgcatacaggatgtcaaattcccagtccatattatatgctcctgtctattattaattattatctgcctgttcaattgccggtctgaaagtatttattgtacacagtaaaaaatgagcttgttttcacatccttttcatcctttatactgattgaatcccacaggtcactgtttaaactaaaccctgctttttttacaaagtgctcgtagtcatcattaaactgctcctgttgtctcttttgcagtatagtgaccttgttctgctctgttttttcccggtccagcttggatatacacttgatgaaatagtagccgtcatctgtgcttatcatatcagaggtctctccatcgccaagctcaaatgccacagcctcgacctcctgtggcagagtgccctttgccacatataaatctgtctggctgtcctcactgctgcctgatgcaactgctgcaaaatcttcctttgacaaaagcttctggctcacagcatctgcgctctccttgctctttacaaagattttctgtatatggataactcttgcatcctcatcactcacctctgtatcaacgcccttcgatagagaattgtacagcttttgcgcaatcgcataatgctcgtatgcactctcaatgtctgataaatcagcctttgtgaatttcttttcagcttcgtttaatgagtcatagtattcctttgcagccttcgacacactactcttctccttgtctgtaagtgtaatcttcttctgctttgcaattgaaaccatgcagtatatgcgcgtcagctcatcaacagtgacatccctgatatatttttccacgttcgacgcatcatctgtctcaagcagatttacatcatacatagtgccatacagatttttgtaattggctaaatatatgagtgcctccgtcttatcgcacttcatattgtccacggaaaaaactatatggctgttcgtggtatttatatcaagcactatctccttgccgccaatactgcagccggtgagtagtgtcgctgatgcaagcagcatacacatcgttttcttaaaatacttcatacctgctatccttccacaacaaggaatctgccgtccgcaatggcaaagacctcactctggtccataagctcatcatctgacatgcccgaaatatctgagcctgcctcatcaaagtaatctcttacttcttttatattcttacataccacagccatgcagtcctctaaaaattcctctgcagcctccggagtatcagcgacctcctcactaaaaagctgtgtctgtttctttaaaaatgtgtctaaaacctcgtcatcgtattcgtacatatgtattcctccatgtaaattatctcttttctttggctttatatacagctgttcatacagcaattatgtcttatatattaatatattatatttttgtaccgcctgttagacattatataatagattgctgtgacatgccactattttttatattcacgacaggtaacaattgtctgctgtaaacggaatgaatatatgagcctctcatccgcctgtatgcttttcccatctgtagaaaaaatccttccaagtgcatcagcatacagttttagctgtgtgctgtatctgtctataagctctttagcagcatttaccctgtctgtcttataatcaagcagcactattttatcattctccagccagaatacatcaataattccctgaaccaatactccctcatagtccatcacaaaaggcttctctttatacaaatcgcctctcttatccgcctgtgccatacgcgctgccacatctgatgatataaactgctctatgagctttggtctggtcagcctgtacatgtcatctgtgataagccccttttttagcatttcatccatgcttttcttcacaaatgcactgactgccacatggtcttttgtatctatatcacacagtctcttgaaatccagacactccatgacacggtgcactgcagttccgcgcagcgctccctgattcacacctgctgcatttttaggctctttgctttcattagaagcaccgcctgcctcatcatccctcgcaaagtccggcacatacgtctccttctcctccaaaaggaacttaggacgctctgcctccctctctgtgctgtcgtacttttcaaccatagagtcatgcttcagctcagataccgaatatttgctttttttagttatatcagaagcatatgcatactcaaaatcaaattcctctgcgagctctttggcttttgtttcatccgctgcacttatgtgcccaataagctgcgcttttgatatatcgtttgccgccatatccatcgcagttcgtgcagcaaactctgctgcatcaaccgtagataccgtatacttatccgggtatgacagcatggccggtataatccagtccaggtaacaccctgcgccctccctttgtccgaagcttattggctggttcgcatttacattgcccctatacttctcaaaggatttttgggcatttgaaagtccccctgtcaggataatcttttcctttgccctggtgagcgctacataaagcacacgcagctcctctcccagattttcccttttaatgcggctttctatctcatttctgattagtgatgttcgctttgtccttgggctttttgttttttccacaaggccaagacccagcttttcatgtatcaccaggtctgattttgtgtcctgcgtgttaaagcccttgccaagcccggaaacaaacactacaggaaactcaaggcccttgctcttatggattgtcataatgcgcaccacatcgtcattctcgcctgcggtatcggcctctccgtagtctatctcgtatttctgctgtatatctatgtacctgacaaagtgaaacagccccttgtagctggtcttttcataggctgcggccatctcaatcagcatatctatattctgtctgcgccgttttcctgccggcatggccgatgcatacctgtaaaagcctgtctcatcaagcatcatgtacaaaagctcatggattggcgtatcagctacagcacctcttagtctctcaaataccaaagcgaaggctttaagcttctcgtcctcatagccatcctcacctgccatggcgctaagtgcagcctgtgcaaagcttacccccttaaaggcagacctgatctgtgccagctcctcatcatccatgcccacgataggcgaagcaagcactgctgccatcggaatatcctgcagcggattatcgagtatgcgaagcatggacagaatcacctgtatctcatacgatgaaaagtagcctgtattcgactctacatgtgccggaatatcacagtcctttaatactgctgccactgtattgccccaggttgcaacacttctcgaaagtatcactatatccctgtactgcacggctcttagctgccctgtctttttatcagtcaccatgccgttttccatcagactcctgatacggtttgcaatcaaaagcgcctctatctgcaccttatctccatcctcatcctctataatttcagacaactcctcatccttgtagtcaacaagcaaaagctcaggacgcatcgtctcatccggatagcttgcaccgggatacagtgccgcatcgtcatcatactgcacattgcccaaatctgctgccatgattttgtagaatatgtcgttagtaaagtctaacacctcattcctgcttctgaaatttttatgcaggtctattctctggtgtgcactgtcatctgatgtatatgtgttgtatttttccataaacagctccgggcgcgccattcgaaacctgtatatgctctgctttacatcgcccaccataaacatgttgccgactccctggtgctctcttgaaatagcggtaagtatatcctcctgcacctggtttgaatcctgatactcgtcaatcatgatttcctcaaaatgttttgaaaactcacgcgctgtctctgtgggctccagtgtctgttcatccaccagtatacgaagcgcaaagtgctctatatcagaaaaatcaaatactcttttttttgtttttacagtctccatagcatcataaaactcgagtgagagccttataagctctttaacaaatggcctttgacgctccagctgctcatacataagcttggttgacatgccaaagtatttctgctttattccgtctaccgtcttcttggcagcatcgcgcatgcttttcacgcgctcctttttcttctcatctccgtcaaatttcctgatgacagcaattctgccaaaggatattttgtttaagaattcctgcatgccgacatagcctgtcacatcagccattccatcaaacagtgctatatcctctgaaagtgtaagcgcatacttttcaagcccgggtgtagctgatgccaggtctttcgccattgtaagctcctgaacagcctcctccaaaagcaccctgctgtaatccactatctccttaatgatttctgagtcctcaagctgtttagctgactttatatcatagagccttaggagactgttcatccactttctcggccatgatgagctgcccgccttatagtagatatcctccaccatctgcctgacggcagagtcatttctccccttgctgtaggtatctataaggttgataaatgcctcgttgtcttctcttgcataattgtcctcaaatacctgtgccaaagcatcctttagcataagcttaagctctgcctggtcaccgatcctgaaatcaggatccagattaagctgtgcgaaattattctgcaccacaaacagacaaaacgaatcgattgtagtgatgagcgcattgtgaaccagtgtcgactgcctctgcaggttctcatcgtccggcttttgctccttcaagctgtctatcgcacggctgacacgctccctcatctcagcagctgcagccttggtaaacgtcaccacaagcatcctgtcgatatccaccggcggattatccacacatattctgtttactatacgctcaacgagtacagctgtctttcctgagcccgctgccgccgatacaagtatatccctgtctcttaaatctataacctttttctgttcactggtccatttaacatccatattatgtctcccgattatggctttatattattatctccatagcatgctttatgctctgccgctgcaatctgtgtacgcattttatcaagtacatcttccttattgtcaccgttaaagcttctttcgctaaagcccggtatccttgaatcatacctgcatatggcctgaaaagcgcaatatgcgcagctgtctattttcttgttcttgataggattgacggcaacatttccatcgtatatttctcttcctatctcgcgaagcttctctcgcgcaaaccttgttatcacatcaaactcttcggcgtttgccacctttgagcctgcagctggtgtctgatccttttttaaggtgacagggattacgtcagagcttttctcaaagtctctgtccatgcctctgtatgccttttcgtccgaattgataagcccgtcaggctttagcttctttaatatcatctgattgatttcttcctcagaaagctccgtgcccggtgtcacatcctttaaatcaattacaggatcgtcgatgtgatagtacagcataccgcccggctccacacttacctgctttagcgcctctttcttttgttccatgacagcgtccatgtacactgcaagctgaagctgcgtgccatagtacagcttcaccaggtcaaaaactgtatttcccgacttgtaatccagtaccttcacaaaaagcctgccctcatccgtatatgtgtcagtcctgtccacgcgtccctttatatcaaccgtcacatcatttgccatatcaaggctctcgtaaaaggaaaactcaaacctctcaggcacaaagctgcctcttcgtatctgggttgtgagtgcccatactgtctgcttaaagaccgccttcatatgtgatatcgaatgttggctttccgctgtatcaaatatgccaaagcctgtatactcatcaatcacctcatttattgcttccatcgcaagctcatctctttttgcatctgtcacgctaaaccagtcagtactctccctgtcaagcttcttactgtatctttccagtgcttcatgatatatattacccatatcaagggatgtaaagccactctcctcacgctctgtaagcctcaatccataatttaaaaaatgcgcatatgcacacctggcaaactgctcaaagcgcgtgatactgccctccatgtgtctgccgtatatgcttcttgccacatttcggctaatcggatcctttgaataatgctcaaaccttgcatttatgagcctctccacggcatttttttgagtaaattctttatcgtctacttcattaccgtccccttcatcactgactgatgcgtcatagagcatcaccgctgctgcaatctcgcaccatctgtcatccacctcatttgacagcagataatccagagcactctgcctgcttgatatatccaaaagctgttctacatcctctgtctcagtcacgacaagctccggaaacatcccctttaatatacctatgaggtacgatggctgggcagcctttttttcactgtcaagtctcgtatagctgatataaagttccctggatggctttgtcatattcagatacagataaaacctctgtataaatgcctgctcccttgccccaggcgcaagctctatatccagctccttaagtgcctctctctcatactgggatataatgcctcctcttcctgccgcctttggaacaatcccatcgtttacgcctgcaaaaaacatgacctttatgttggtcagacgcgttctctcaatatctccgatggtcacagtgtcgtatcccggcggtatgactgctacatctgccgcatccagtcctgcatccagtatctgtgtaaattcctctgcatccatgctttcatcacccagcaccgccacatatttttcaaagagctgcatgactattttgtatatctgtccgtattcctttgatgcggtctggtcccctgcatcaagcagtgcctgctccttttttgcaagcttatcaggtatatcaagcaaaactatcagcttgtatatagcgagcacatagtcctttaccgttgactttttatcggaaaacacctgatataccggctttagcagctccattatatactccctgctttggtttaaaagctcaaggtcatagcctgccttatgctttggcagcctgacccactttttgtcccatgcgcttttacctctaacaccacaggcgagcacgtagttttcaagtacatctatttcactgtccgaaagctccgtaaagccgcaccgcaaaaatctaaacaccgcatctgccgagaaattttgtgccgcaatatcgggtattgacctgataaactcaataaacggatggaaaagtatctcctgtgtggcatcgataaagtaaggaatattgtatttgtcaaatatttcacgcacataacctgcatatatattcacatctcctgtgactatagcaatatcgcggtaacgcaggttttcgtttctcacgagctcatttatggttctggctatctttgtcagctcctgcttcgggtcacgcagacagtctatatgaatgtgctttggtgctttttcaaaggagcgtctttgtttcctgaaaagctgctgttccataaagcttagctcttcgttttctgcaagccggtagtttttatcaaggataataggttcctcgacctctataccataaaacgctgccatttcggtgagtgatttcactgtcctttttggcatgtcaaacagctcctgcatgcctctgctcttaaagatatcctcacgacagtctattgtgagcgttacatatattttctttgaaatgacaaagagctttttgatgagctggttctgtataggtgtaaatcctgtaaattcatcaaatgcaatgactgaatttctaagaatggcagactcatctgccacattgcaaagcacattgagtatttcctctgctgtgatatatttatcctgcatgaacttctcaaatgcttcatacagcacaagcacatccttaagcttgccgataagcgtatcagacagactgccggaatcaatatatcttcccagctcctccggcgatatattgtactgcacaagctccgaaagcagtgactttacctcgcttatatagccgatgcggtttaagtttctgcctattacgccaagcttatcagcctcctgtgccgcaagctttctgagtacaaggttcttacccgtctcctcaagcaccgtgagatttgtgattccaagctcatcaaacactctgtaggctaagcgcttaaagcttagcacatctatattcatgatagctttattctccgacaaatccacaagctgtctctgcgtctgcattgtaaactgctcaggcactattacaagataattatcccttgggtgtgcctttgcctctttcactatcgtgttaaagagatattttgtttttccgtttcctgaattacctgtgataaactgtaatgacataaaaagactccatgattaactactgtgtaaaatgtatacagtaattatatcatgaagtcccctattattgaattacttattgtgcttaaattcagcttaatagccgctataccttgtgattagtgatggaaaagtctgattcctgtaaagctcattaccataccgtacttattacatgtctcaataacatggtcatctctcacagatccacccggctgggctacatacttcacgccactcttgtgagcacgctcaatgttgtcaccaaatgggaagaatgcatcagatccaagtgctacatctgtattcttgtcaagccaagctctcttctcctctgctgtaaatacgtccggctttaccttgaagaacttctgccactcgccctctgcaagcacatccatataatcctcaccgatataaaggtcaatagtattgtcgcggtctgcacgtctgataccatccacgaactgaagtccaagcacctgtggagactgacgaagccaccagttgtctgcctttgagcctgcaagtctggtacagtggatacgagactgctggcctgctccgataccgattgcctggccgccctttacatagcatacagagttggactgtgtatactttaaagtaatcattgagattgccagatcgatcttagcctgctctgtgagctccttattttcagtcacaatatttgagaagaaatcatcatcaatatgaagctcatttctgccctgctcaaatgtgatgccaaatacatcctttctctcgataggtgccggctcatatgacgggtcaatctcgataacacagtaattgccgtttttcttagcctttaaaatctcaagagcctcgtctgtgtagcccggagcgataacaccgtctgatacctctctcttgattacaagtgcagtgctcttgtcacatacatctgaaagtgaaataaaatcaccaaatgatgacattctgtcagctcctcttgctctgatgtatgcatttgcaagtggtgtaaactcgatatccatgtcatcaacccagtaaatctttttctccacatctgaaagtggctgtcctactgctgcacctgcaggtgaaacatgcttgaatgatgttgcagccggaagacctgttgccttcttaagctctcttacaagctgccatccgttaaaggcatcaaggaagttgatatatccggctctgccgttaagcacctttataggaagctctccctccttcataaatattctggctggtttctgatttgggttacatccgtattttaattcgtattcctgcatttttctgttctcctgtttttatctgcttatcttgtatatttgaccgtttatatagtgttttatttgtttttgtttacgattctgctctcatactcgcctgttgcgatatcaatatatctgacaaaaagtgataccttattgtcctcgttaaggttctcccataccatatcggtaaactcatcgatatctccctcgatgtctacccatgtaggctcaccctcaaagcttggcagtggatttccatcgcccatatatgtatggataaaatgtccctctcctgcaaccggtgctgagtatgcaaatgtatatctgttgcatgcatcaggattgccgttgttgctctttaagattgacatagcatagttgaactcgccattgtcaatatgcataattcctgaaattcttggtgtatagttaggagcgtcaggctcaaactctcttgtccttaaggcctgctcaaatgtctgctgcttgtccatcagctcatagatagtatctgtctggtcaccgtttgtgacaattgtcttgttgccgagcactcttacaggtgcgtaaatgataagacttggatcctcaagctttgaagggtcaaatgcctgtgttctgataccctcgccatcctctacaaatactctgttgcggctgttttcgcttctgcccatgataaagtatgcagttacagccttcttaccatcctttgtgcggccgattacgatacctctgccagggtatgttgtgcttgataattcctttgctaatgatactctttccatgtcatcctccatgttttctgataatgtggtctgcattcccaaattactcgggcctgccggaataaaaaagaccgtctgaacacacataaaaatataaagctctgcaggaaacttatataaatgtgcgcccagacggtcggcaatcaactgttatactccatgtggttatccacttccgtcagtcatataactgtctttatttaagcatgtatttttgtcattgtcaagtaccactttaaaataagcatgtacttataagctattcttataagtacatgcttgtaaacaatgccattatttactaatttttaaagctgtgaataggtgccgggattcttcctccacggtttacaaatgcatcacaagagaatctgtttaccggcataaccggtgcagttccaaggagtcctccgatttctaccacatcacctacatcctttcctattgccggaagcagtctgcaggctgttgtcttctggtttatcataccgatagccatctcatctgcgataattcctgaaattgtggtggcctttgtatcgcccggaattgcaatcatgtcaagtcccactgagcacacacaggtcatagcctcaagcttttcgagggtgagtgcaccatcgtttacggcatctatcattccctgatcctctgatacaggaataaaggcacctgaaagtccgccgacatatgaggatgccatgataccgcccttttttacctgatcgtttaagagtgcaagtgctgctgttgttcccggagctccggctctctctaagcctatctcacagagaatatcggctacagagtctccgatagccggtgtaggtgcaagtgagagatctatgattccaaatggcactccaagcttctttgaagcctcctttgccacaagctgtcctactcgtgtaaccttgaaggctgtcttcttgattgtctcacagagcacctcaaagttctcgcctcttaccttttcaagagcagtctttactactcccggtccgctgacacctacattgatgatggcatcagcctctgtcacaccatggaaggctcctgccataaacggattgtcatcaggagcgttgcagaatactacaaacttggcacagcctgatacaggaaggtgctttgtcacctctgctgtctcctttatcatctcgccaatcagctttactgcatccatgttgattccggtctttgtagagccaacatttacagagctgcataccaggtctgtctcaagcattgcctgaggaatggatttgattaaaagctcatcagcctttgtcatgccctttgacacaagtgctgagtatccaccgatgaagttgacacctacctctttggctgctctgtcaagagtctttgctatggtaacaaaatcctctgagctcttgcaggccgcaccgccgacaagggcgataggtgtaaccgaaatacgtttgtttacgatagggatacagtagttgttctctatctcttttcctgttgatacaagattctttgcaagtgttgtaatcttgttgtagatattctcatttacctttgcaaggtctgagtctatacagtcgagcaggctgataccgagtgtgattgtacgcacgtcaagattttccttctccaccatgtcattggtctcaattacttcaccaatatttatcattttgctgttctcctttaactgtgtatgacatttttatgctaaactagattcgatgcatcatctcaaagatttcttccttctgacactttattgttacaccaatctcttctccaagtgcatcaagctggtcagaaatctctgcaaatgaagctgtagcatttgccatatccacaatcatcatcatgttgaaataacctgaaacgatagtctgtgagatatcaagcacgtttacactgccctctgacagatatgtacatacctttgcgatgattcctactgtgtcttttccgacaactgtgatgattactttgttctttgtgttatccataacaacttattctcctgttctcttattctactgctatgcggtctgatgccctgtctctcttagccacatacatagggaaatcacttgccttatatggattgtctcccattgtgacctcaagcctgacggcttcatacgccagcttttcgtagttgttttctttactaaggtgtcccagtattactgagccaaatttatcatgaagaagctcgcataacaactgcccgcttctctcattcgacaaatgtccgctgtcacccatgattctgcgcttgagcggatacggatatgccccagtctggagcatatttatatcatgattggcttcaagcagcagcccatccaggttctgaagctttgaaaccagtgcatcatcatacgtgccaaggtctgtcacgactgccatagcatgattttcgtttttaaatctgtaagcgacaggatcagccgcatcgtgtgatatgtgaagcggctcaaactctatatcgcctattgtaaaatcaacgcctgcctcaataggatgaaacagctcatcatctatatttccaacggatttggtacattttatggcccctattgtggcctttgttgcataaatcggaatatgatagcgtcttgccatgacaccaagccctgcgatatggtctatatgctcatgtgtcacgagaatcccctgcatatctgtggccgtcatatcaaattcattcaggccgttttctattttcttaccgctgatgcccgcgtctatgagcacatgacaatcatccgtacccacacatatacagtttccactgctgccgctggcaatgctgcataattctaacatgttaattctctttccagtataattctattttgtctccctcatgaagctcctcggaaaactgggcatctctgccatttattacagtggctattgccctgccctttcctgcctgtaaatcaaatgagatatgggtaaatatatcgacaaatatatatgtatccttgccggacagctctacaggctcaccgtttacaattactgtaactgtattttttgatgagtcttcttcgtgtatttcttcctgtatatcattttttggcaattcattttccggcagttcgttttccggcacagcagatgcttcagcttctttagcaaaatcatcatgcagctcatcgagcacctgattcatcatctgctctgaggttctggctactgtgttgtcagactcttgtgtgtcattataattgttattgtcgattcttgcaacaccatattcatctgttttccactcaacagagaaattttcatatacgagagtgtcgagatcagcctcttcattgtttacaaatatcatctggtctgtgtcaataacgaggtccataaactgcgcaatctggcgcactgtatagtaatttcttgtctcaatcacatcattttccctgatgctgtaatcctccggctcaagctctccgtttacctggacaaacctaggacatgaaacccttctgccgtttatgataaaagtaatgacagaatgattgtactcatcaagctgcgatatcttatacactgctgcctctcctgctgtggacggctctatgattatctcactgtttggctcaagtggtgtattgatgcttgcaggctttccgttcatggtcaccactgcgccctctcctgcttcgcctcttacaagtcttgccacaccatttaccgtaaagtttatcggggtgccacgctttggaaacagctcatcgtttggaaatcccgcctgaagcgccgcatcgactattgtaagcctgttattgtcatagagctttattctctcaccgttgaatctgaccatgataaaattatttctctggtcataataattcaggcatataccaattggagtgacaagaagcggatccttcttaatatcctcctgctcaaaggtcacatcgccaagcacttcctcacctcttagagcgactctttcctccggcaggtcaaggtcttccgcaagcttttccgtgaagccgtgtatcttgcccccgcctccgactacaaagcaggcactcactgttttgtcaccgtttagctctctgattttagccgatacctcttgtgcaatattatcaacaacaggtgctgccacatcccagacatcctttgcaggaattgtgtgctcgatgctcatgatatccttgtatgtaaccgtatcacttgtcgtagactgaagcttgatgctctccgccatattgaaatccacgaggaaatgctgcacaataacttctgtcagctcatcgcctgcatgcggtatcatgccataggctatgatacttccgtctcttgtgattgagatatcactcgttccggctcccacatcgacaagtgcgatattaagcatacgatagttctccggaattgccacattgatagcggcgataggctccaatgtcatattggctacactaagcccggcctgtcccactgccgcatacagtccgtctaccacatcctccggcagaaatgtaactatgatatcctcgcctattttattggccttatgaccctcaaggctgataaacacctcatcattcaaaaagaatttgactgtagaatatcccacgcagtaaaacttatagcttgtatcgttaacctccttgagtgcctcctgtgctttttctatgccaagcaggtcaagcgtatggacatcctcgccggtcaccacagactcctgcgcatactcatactccacatgcgtcgtgacagtctttaatactcgtcctgcggctgctatacacacctcttcaagtggctgtcctgtctgtttttcaagctcgtcctttacttccttaatggtttttgccaccctgcctatatcatgtatctgaccgtcaagcatcgctctggtctcatgctccttcacatactgtgctgtaaccacaaattccttgtcatcagtctgatagccgacagttcctacaacatttcttgtaccaatatccaaaccgaatacattgttcatttccactactccttgtatttgctaagcgctttatttatcgaagctatcgtgttttcgatatctccgttattatcgataacctccctgcagtgccttctgtactcatcttctttgagctggcttgcaaagatgctgtctatcttctcatctgaatagcctcgtgttgacttaagtcttttccttctgacctcttcacttgcataaatataccacagctcgtcgcagatttcaccatatccctcctctataaggagtgccgcttcaagtacaagcatgaaaagaccgtctttttttgcctctttaactgcattaagcacatattcctttactgccggatgtactacttcatttagaagctctctttttttatcatccgaaaaaatcactccagcaagtgccggtctgtcaaaatgcccgtcctcaagccatatcggttcgcccgcaaacaatccctttaatctgttgtagcagtcgcttcccggctccatcagctcatgtgctatctcatcagagagcatgacccttacgccatcaagttccttaagatagccaagcactgccgattttccggcacctacaccacctgttattcctataaaaatcatactgtttccttttctgtcatcaatgcgcatcataccagtcatagccacactcggtgcccacttccatggataccttcatgtccaccgcaccacgcatctctttctccagaagcttaatcactttatccttctcagcttcctttgtctcaattaaaagctcatcatgcacctgaaggataagccttgactttaagccctcgtcaagaagcctgtcatgcacacgtatcatggcaatctttatgatatcggctgctgtaccctgaataggtgaattcattgcaactctctctccaaactgtctttgcatgaaattgctcgagttcagctctggaatcggtctgatacgcccaaacatggtctttgtatagccatttttcttggcatccaaaaccgtctgatccaaaaactccttaatctttggatatttgacaaaatagctgtctatatagccctgtgcctctttccttgagatacccaggtcgttagacagaccaaacgcgctgataccataaacgataccaaaatttaccgccttggcatttcgtctttgaaggtctgtgacctcatcaaacggtgtgtcaaacacaagggatgctgtacttctgtggatatcctgaccattcttaaaggcctctatcatcctttcatcccctgaaagcgccgcaagcacccgaagctctatctgcgagtagtctgaatcaacaaacagatctccatcctctggcagaaatacctttctgataagcttgcccagctcaatccttatcgggatattctgcagattaggctctgtgcttgaaagacggcctgtcgcagtgattgtctgatttaaggtagtatggattttgccatcggatgcaatatacccggaaagtccgtcagcatatgtgctctttagctttgtgagctgtctgtattccaatatatccgcgacaatcggatactccggtgccagcttttcaagcacatctgccgcagtagaataaccggtctttgtcttcttttcatttggcagtccaagcttttcaaagagaatgactccaagctgctttggcgaatttatattaaactcttcacctgctgcctcgtatattttcttttcaagctcagctatcgaaacagcaagcttgtctccatactccttaagctttattccatcagcccttataccctcattttccatatcatacagtacgaaaacgagtggcagctcgatatctctgtaaagagtaagcatatccatttcctttagcttctgcaaaagaaccggctttgatttccaggcagtatacacctcgtagcaggcacagtccactgcctttttctcatcctccttcatcatccgggtgaaatcaagctttcccagataatcctttttagatgagagcataagccccagatagtcctttgcaaccgcatcatagggatactccccgacaagcggattgataaggtatgcagccaccatcatgtcaaaatatctgcctctgtcatctgcctttatctctttgctcttaaatctgtgcagattggtctttaaatccggtgatatccatgactttacttccagggtatttaatttttcatccaggaagctgcatgaaatctcatcacctgtacagataaaataaatatcctcctctgaaaaacaaatcgaaacagcaagataatcgttagaaaccggctccgaaaacagacttagctgtccatcactttcgctgttttccaaagactctcccggtactaccgcaaaagcgacctccttgtcctttgccttctcaaacacactctctgcagtctttaagtcccttactaccacaaaatgctcctcggcattgtttttaggagcctccacgttaaaccgtgacagcatgtttttgaattcgtatcgtttgcacagtaaaaaggcttcctcagtgtagagtgactctactccgccactaagctttgcatcagaaaattcatagtcaaccggcgcatcaagtatgattgtcgcaagctccttgctcataagcgcctgctcccagtactccactatattctttgaagcccttggcggctttacattctcagcgtcctcatgtactgcctctatacagtgatattttgctataagtgcgcctgctgtcttttcgccgataccgggtaccccgggaatattatcagacgtatctccctgcagagcctttacatcgataaactcctttggagtgacgccgtacttttcgataacatctgctgtattgtagttttctatctcggttcctgttttctttgtctttggaatccttaccatgacatggtcagtcgcaagctgcaaaaggtctctgtctccggaaatgatggcgacatccataccggccttttctgccctgacagataatgttccaagtatatcgtcggcctcatagccttccttttccacgattttaatgcccatagcggtaagcatttcctttatcataggcacctgctgcctgagctcctcgtccataggctttctcgtgcccttgtacgcatcaaacattctgtgacgaaacgtcggcgcatgcacatcaaatgccaccgtcagatagtcaggcttttcctcgtcaagaatcttgaacatgatattcaaaaatccatagactgcatttgtgtgaagcccctctgaattggtcagatcaggaagtccgtgatatgccctgtttaaaatactgtgtccgtctataagtacaagcttttcactcattttatactttccttattacttaatattgttgtaatcgctgccggtcacactgcagtgcaggcagtaatgttaaatagctcttgtatatttcttaagccactgagcctcctcatcattcaaaaatggtgaaacaagctcataaactctcgcatgataagcattcaggtatcctttttccctgtctgtcatctgatttggatcaatcgcatcgagatctatcggtacataggtcagattctcaaaatacatgaactggccatactcatttttctcaccctttcggcagataagctcattctctgtacgaataccgaatttaccctctaaatagatgcccggctcatctgtagtgaccataccctcttctatcacacgctctgcagtcctgcccggatactgcttccagtgaaagctgtttggtccctcatgcacattgagcacatagcccacaccgtgtccggtgccgtgattgtagtccatgccaatctcccagaaaggctctcttgccagaatatcaaagtttagtcccgagcagccctccttaaaccttgcatttgccaggttcatatttgagcggcaaactctcgtaaacatatccttcatctcgtcagtcacaggtcctaacgcaaaggtcctcgtgatatctgtggttccctccagataatgtcctcctgaatcaaccaaaagaagactctcaggcttaagctgcctgtcagactcctctgttgcagagtaatgcacaatagcaccatgatcagcatatccgcatattgtggcaaagctcaaatcaagaaagccttcctgctcagctctaagcgatgcaagataatctgaagccgaaatctctgtcatgggtatcttacctatatttgtcttaagccagtacatgaacttgcacatcgcaactgcatccttcaaatgtgccttgcgcagattttcaagctgtacttcattctttacggccttcatgacaactgtaggatcctccgcatcaatcaccttaacaccatccggcaggctgtcgcagatgcggtaatttacaatcgatgtatttaaaagcactgtctctttttcatcaatatgcttcacatattcataaaaatcatcgtaaggtcttgtctgtataccattcttatcgaggtatgccttaagagtctctgtcacaacctcttcctgcaaaaaccatatgcagctgtcctgtgacagtgccaggtatgaaagcactacaggcacatagcttatgtcgcctcccctgacatttaaaagccaggcgatatcgtaaagtgatgacatcagatgaagtgttgcacccttttgtgccatctgctctctgactcttttaagctttgagcttatatcctcacctgtatatttattgtcaaaaatcatgacagcttcctttgacataggtggtctgtcagtccatataaggtcaatcagatcctcatttacgtacatgctgccgtgcttttcttttgcgatttcagaaagccttttgccccatgcggcatttaccactctgccgtcaaagcctattacaccgccatccgaaagagtatcctttatatactcatcaactgtcggtacgccctcctcgccaatcttaaacagctttacagtggtatccttaagctgcgcagccgcctgcacaaaatacctgccgtctgtccatagtccggcctcatccatagtgatgactgcggtacctgctgagcccgtgaagcctgtaatatatttgcgtgccttaaaatgctctcctacatactctgactcatgaaaatcagcagtaggtaccacatacagcgagatgcccctctttgccatctcgcttctcaatgcttttaatctatcctgtatcattttattatgcctctttaaattcaaaaaattttgtatctaattccggatacattctctttaatgagattggtttgccggatttgttcaaaaagcaatggctgctttttgcagtggtgcgaagctcgcctgtctctttatccttcatgacatactcaagctccatcttgattccgttatacttaagcagctttgtgtagatgacgaccgtatcatcgaaatgtaccatactgtgatactctaccgatatcgacagcaccggacttatgatttccatctcctccatctgcctgtagttgagtcctatctgatccatcaaatcaagtcttgcttcttccatccacttgacatagtttgaatggtggattatacccatctgatctgtttcataatactttgcgtggtgctcgtaaggacggattctaagttccccttgtgagccggcaatctgtaactcattgtttgccataaaaacttcctccattcatattttggtcttatttctattatgccacattggacagctaaattcaacgacttgaccgtaaaatataaaccggctgctacctgcgtatcatactgtagcagtctctgcatatattgcgtgaatttccaatcgaaagtattctgccgcaataccggcatctgataatatactcatccttgctctttgatagaagctgcataatctttgcctgtgttttgtcgcgctcgttttcaagccagtcctcatccacaattttgcccatgcggactgaaaactgatagtacaaatcaagctttttgtaataggattcgtatttcatgagcccctgatactttgaatgcttatcaggcttgtcgagagagatatcggatgtatacgacatgcagtagcgcagccattgtctgacaagctccctgtcctttatatctataggacatgtaatcatcttataaagcagatatttgtcatcaaaatctgcgataaagtatcgctccttatacgcatatccatacaaaaacaatatctcatcgacattgattttcctaaacggtgctgatggctctgcctcatgccagagcttaattatcgcatcaagcggcgcatccattgtaaggagcacctgcgggaagccaagacttactatatcaatatcctgctccggtatatttagcgtattcttcagataattcagattcttttgtcccaaagctgtcacatagcctgtatcatacagaccaaatctgcctgcacggcccgctatctgttttatctcagagatgacaagcggacgtcttgatactccatcaaacttttccacctccagaaatacaattcttctgaccggcagattgagtcccattcctatagcatctgttgacacgacaacctgtgtctttttctcattaaaaagcgtcatctgccttcgccttatttccggcggcagacttccgtatatgacacttggctttatgccgttttcctcaagacgccctgctatattgagtaccgacttctttgaaaatacgataaaggcatcgccatccctcacatcctgtggaaatgaaaacggcttatcctccagctttagagctgtctttctctcatactctcttatctcatactcgtcatggcaaagattaatcagatgaatgacaacatcctttgccaccgggctcatgcatatatgaatctctcctgcaagtgtaccaagaattgccctggtccacgaatgtcccctgtcatcatctgctaccatctgtgcctcatcaatcactgcgatatcatactccttgtcacagtcaagcatctccactgtcgatgctgtaattctgctgtctgatacctcaagacactcctggcctgtaagcatggtgcatggtatgcctgcatcattcatcttctcatatacctcaagtgccagaaggcgaagcggtcccagatacactccattttgcgccagcttaagcctctcaagtgcctgatatgtcttaccgctgttagtcgggcctatatggagtatgaagcgccttttcatgctctgtgcttttggaaactccagctccggccgagccggaaccagcgtgacaatctctcttctaagctccttgctgcggtactcattgtaaagcgccttcatgctccttgtacatatcgcacctatatactccttgcgcaaaagctttaaaaaatcttctgtgagatactctgcttccttctcatcaaactgctccatatccaccctgacgagctgcggaatgatttctctatttaaaatatgctttgcattcttattgtttgaatagtaggtaatcaatgcaagcctttttatttcctgatgcagcttgtcgagtgccacagtctcattttttgaaaatcgcgcatatttaattgattttgccttgctattgagcctgtgaatatagtgtgccagctttacaggtttacctgtacttctcttcgcattctccctgtactggtcaatataaaactgtaccagtacatcttcaaacgatttttccatatatgtgtattatcctctttatttgtatacgccgttgagtgtcacttcaaaagtaacatcctttccggcaagctccgtatttaccttataatcatccggaaatttcaggtttaaatcaaaggtttctcccaccttgtgacctaccactccgtcctcaaagccatctatatagctgcctgagccaagcaccaggtccgcgccctgtccatcagtgcttccaccctcgaatttttctccgtccatatatccggtgtaatcaatatttaccttatctcctttttctgcaaccgtgtcagtctctgtattcggtgttgctgccttggtctgtgaatcactgctttgtgtctctgatgcctgagattctgtggtctgtgatgcagcttgcgtaccggcagtgccctttgacgatgaacctcccgatgtcgcaactgcccagatgagcactatgactaccacgacaactgccactaccggcacccagaatttcagcagattcacaacctttgccttcttctgcgctttttctctttcgactcttcttttttcctgtgcgatttttttgttttgtttgttcattttgttaatctcctgttttatttttattattgaattatactattacaatttgaacattctgtgtttcgcataaatgaacagtatgcgttgtctgtcagtgcattcgctatctgtcactgttcgctttaaactttaaacggctgcgtctcttaactatttgacgcaataataaaagcagtagaaagacacccacacagactgcgcttatagctgcacctgccttaagccccggtgtctcataatttagctctatctcatgctctccctcatccagatgaatgctcacaaaggtatctgaaaaatcctcatactctgcatccttcccatccaccttcatagtccagcccttttcactcggaatagaaagcacaagctgtcctgcctgcttcacatcaatgtgtccgcttatgtgtgtatctgaaaaatcatccaccgagagtgtctgctcattgagtgtattgtaagcactctcaactgcagcaatggaaagctcgtatacattaaatcgtacagcatcggcatcagtgtttgtgacggaaactgtctcccccgccttcacgtatcccaggtcaaacagatacctgtgagtggtcttcgagtatgtggtctcatactctccgtggctgaaggtcagactgtcagtgctgcacgaatcgtatgccgcataataatatccgtcatggtcaaaggtgagagtcgtagttcccggattttcgtcctgagtgcactctgtcatggtcagcatatcatctgctgcgccaaggagcctgccaagggaattaatcgaatagattttcgatgacgaggatggcttccacgcatcaatcactccctcatccatcataaaaccaagcggaagtgtgtagttattccgatacagatagtgatttccgcattttccaacaagtgtagtcagctcattctgtggctgtattgattttgtaaccatatatctgaccgaaagcatggctgacgtgacaggtgtggcaccgttataacagtagaaattcttgcctccctccatataaagagcctgataaaaatggctcacatttatattcatcagggaagaaaactgtgttccagaagcatagccgtatcgtgtgtcatcatttttagttagtcggcctgtatcctcaaccctgtaaaatggtacatcgttgtcagctgcatcctcttttgccagctccagtgccttttgcatatcgtccacattggcattgtagctgcttctgccggtacatccaagtcctgtcacagccatattgacagccagctccacaatcgcaataccgcatgttatgaccatcaaaagctccctgttttttcttgctgcaagctttaaaagtactgtcataatgccgtacagcgcaacaaacaatatacttatgataactgcataatactctgtcacatcctcaccggcaaacatcgtgcttactgccataagcgccgatgcaaataccactgccacaccaacatgccacagtcttatgccacgccactttcttactgtagcatagcctatggtcaatacaagaaatgcatacagatacgactgtctgccaggcagcgaatccggaaaatgcagtccgtgccatataaagtcaagctgtttattggcaaagcttgccatgaaaaacaacacaaacaatactggagctatttttttcttccaattaatccttttgttgagcacaaacagtatcaaaagcatcacactaaaggctccggcatacagattcggccagttctctgcaccctcatagacgcttgctgtcgtgcacatcctgccgacctctgataagagattaaaataccactctatctgctttggaaactcgatgcccgacgaaccgctgtagcttaaaatgataagctccgggatgattagcaccatcgcagtgcctccagccaaaagtgagtaaacggcaaatctcacaattgcagccattttaccgccattttgcgtaaagaaaagccatgcaaaccagaataccaaaaagatgcaaagcatgatgctcagataataatttgacaatatacaaagtgccagtgatacatagtaaagcaccggctttttgtcccgcacaagcttctcaagtcctactaccgcaagcggtgcaaccgccacaacatccatccacatgacatcccagctatacgcagctacaaagccggaaagtgcatatgccgtagaaaaaacaaatgccggcacaaatgtattatcgtgatatctgttatcctttccaagaagtacaaaatgctccttcaaaaaatagaaaaatgttgctccgctaagcgaaatcttaaaaatgattagcagctcaataaactcaataatatggctctttggaaaaaacaccacaatccagtttaacggactcgccagataataggcaaataccgatacaaaatcactgccaagcccgatattccatgtatacatgaggctcgcaccatttcttagcttctcccacagctcattaaagaaaggcagatactggtgatacaaatccatatgcaaaaggcagtaatcgccaaatggatatacaccatttcctatacagatgattatacatatgaaaaacggaattaaaaacgctgtcaaaagtggatgctttttaacaaaattcatcacttatcctcccagtcaaacagtctgtaatattgcaaaagcttataatcgtttagcatatccgaatcggcctgcttctttttgctgccggttgccttgtctgatttatttgatgctttatctaatgtcttatctgcagttttatccgtacgtaccgctgatataattggatactcctcctgcagctttagcagaaagctctgatagtcatttgtcggcacacctgccgctttaagtacgtttgcagccagataattaacactcgtgtcttttcctgcagcctcatcaatatcataatttgcccagataacatacggcacctgatagcgcagcttaagctcttcatttgataaattattatagtccatgccgtttgctgcaagaacagagcttgccacagtatcatttggctgatgatcaccgaaaaataccactatagttttctcatccacatttgagaaatattcaatgaggctctttaaatcctcatctgtcagcttaatcaaagaaagatactgatcaagtgcagaattattgagcttatccgctgtcaccgtattgtcaaagccgtagtaggtatccgtgtatccaccatggttttgcatagtgacattgaatataaatgccggctgaccatccggtttgttctcataggtctcaataatcctgtcaaaggatgtctcatcacttatatatttgcgcacaaacctctgattagaataatcctgcataaacgaaagattgtcaaatcccaaaagaggatagaccgtatcccggttccatccactgccatagtacggatgctgtgcatacgttgcgtagcctatgctttttaaatagcttgcaagggaaggtgtcgtgctctttatatactgctgataaggaatacttcctaccggaagaaaagccatcgtattgcctgtcagaaactcaaactcagtatcggcggtatttccaccgcatacagacgtattcagatatcctgttatagtgttttcattgcccttttcaagactgtgcacaaacggcatatagtctgtatttgtatcaaaatcaccgagcactgacaggtctgaaaatgcctcatccatcacaactataatatttggataatcactgttagctgcagtatttgatttatttgcttcattattggctgaattatcatctgtaccggcatagctgt

SEQ ID NO: 1499 - DNA, 5037 bp, Unknown
  gut microbiota DNA sequence
tctgtctgctatacccatcaggcttatcaaccgccacaaacttaagatccatcgcaaaggtcactgccattccattcacctttgtcatatatgcaggtgtaaatagaaacggatacaggtaattgtccgtctggaaatcctcatcctgcagggcattcacaaacagacacagcgcaagtattccaagcacagtcggaattagtctgaacctgaatttccacttaattcggaaatcaacaaaatgcatcagcataataagagctataaatataactgtaacaacaactactcctgcagtcggtgcgaaatcataattggatgcaacacttgtcgccgtaccaattgaaaaaatatcccatggaacaaaaggagtcgagcggaaaagcataacataatgattaatcagtccaaaaaccatggccacgataaaaactgcacgaagtgcccatttcgcccttcccgtaacaaaataaagaatccaggcaatcagctcaaacaaaataatattaaaaaatcccgccataaatctgacttcttcaaaaggattatgttcgtagaactccataagataaaaagccataatcgggaaaatcgagaaaaatataacattgaatataatttcatattttttataaatcttttttatcatcataatgctcctgtttgctatctggtattacagcctatatggcagatttttgggtacaattttggggcaaatttttcttaaaagtaccctaatttctttaatttttttaaagattataaataaagaaaaaacccgcaaacccttgattttactgaaaatcttggatttacggggttttgcaaatagtgccggcagtgggacttgaacccacacgggcttgcgcccaacagattttgagtctgcatcgtctgccattccgacatgccggcgtcttacgaacagacaatattctatcacaattattgacttcatgcaactaaaatttgtaatttcaatataaatttcaatgcgattgtgactgttcacgcctaacagtgtgaccagcaacgattacagctcatttaaaaatgtcaaagccttgaaatatgtctcagcatacaaccttattcttaccggtacattttccgacataaagctgtttgtcaacaaaattaatccattccttgtaatcctgccccactttatattttcctgcacctatggtcactgtcatccttccgctgcccttagatgtccagaaggattttgaattaatctccacacgaagctcatcgagaaaattcttaggcacctctccatcgacacatttgccaagaagtaaaaactcttctcctccccatctgcaatagctaagctcaacacctcgagccttgtttacgatagtacgagcgagcatcttaagtgcatcatctcctacattatgtccgaatgaatcgttaattttcttaaaatcatcaatatcaatcattgcaaggaaatattccccctgcttctcagcctcaaaaagattcttaagctttgccatcatatagaaacgatttggaagctccgtcagcgcatcaaactgtgcctgcttttccattgccccctcctcggaagacataaaatgcaaaaggcacatcatacatgttattatcaagaaaactacaccagaaatcatagcaatagaaatactcttaattacaacagaatccaacttatataaaggtgcgtaaaagccatcaagcatataaagaataatcagagcaatagcatatacacagcaaagcagaatggcaacatgattcttttttttcttcctgaggaccacataatccatggaaaaaagaaaaaacattgcatcgatcaaaaaaagctgaaaattacattgaattccgagacaaaccaccgcaagtatcatataaagcaatatctcaacagccacactataaacatatatgctcagtttttcagattttgtcagactgaatgcaaggaaataaaagcatatgctgatcagactgactcctgccatcaaatctacacctaatgatgaaaacataaatagcatcagcagatggatgacaagaaatattttgtttacattaaatagaaagctctgctccttagcagtactatcattgctactcattgtccaataccttcataaaaaatatctaatatattactatagaataataacacattttaacaaatataacaatatattattgtgcaaaagtactagactattttgctactttttttctaattatatatccaataagaataataacagcacttgttatgacacttccataaaatgtcattcccctgcacaaaagctccatatttgctgcattactaccaacaagctgtttaaacccatcaatcataatataatcagccacgcccatagcaccgggtataggcacacaattggagcccatcgccacaaaacactgtatcacactcacatcaactgccttatttacgccttcgccgactgccataaaaatcataaacgataccaaaagctgtgaaactctctgcattatattccaaaagaaaatctcgatgagaagcccggtctgccctgtgatactgtttgaacactcctgatattctttcatagtatttttaagctttattcgaagcctgtcaccatgccgtattatatgtattttttcaaaaagccggataagactatcacaaattgagtatagtatgcttcccttccttagcagcatataaaatacaagagccagaaaaatcagcaccacaatccccaaacatataaatatccgcgaaatacctgagaaatttttcagcaatggatacttaaaaatcatgcatagtaagccaattgttaaaagtgaaagtgtatacataacaagattaatcagtaaggccactgtagcagcatagcccggtatgccatcccttatcatgaaatacgcactggctggctgtcctcccgatgccgatggtgtaatagccgaaaaatacacatcggctccaccatacacagtaccatcaatcgcgctggttttatacccaaagtgtcttgccatgcgtaccagagcaaagccttcaaaccaaataaacccaaacgtacaaacaaaactcataaaaagccagcctttatttgcatttctgataaaactcataagaatctcaaacgaaaaatgcttgctctgtgagacaacagtccatatgctcaagatagctataaaagcagaagctatcgcccaaaatatcttttttctgtccattaaatctaatccccttaaaaaaaactggtaaagtgaattatgaaaatacaccataccagtttattgtagagaatatatataactttatcaagtaaaatattattaatatctttttaatgtttgttaaattatttactgttacaactaacaaatcagtctaaatacaaattaacttctatgattcctcttcctcatcattgtcagtgttcatcatatacacacccctgcttgcatctccatcaggattctttccaaactcgtaatcatttcccggcagaatagcatttaagaaaattcctgcgatagctgcaattgccaaagctgtcaatgtaattgatgttcctgctacagtaaatgtcagtccatttccaaaaccaagaccacatacaaaaataacacctgcaataatcagatttcttgatttcgtcagatctaccttattttcgacaacatttctaactcctattgctgaaatcattccataaagcataaatgaaactccaccaataatcgctgatggcatagtagatattacagccgaaaactttggaataaacgaaagtgcaatagcaaaaacagccgcaatacggataactcttggatcatataccttagacagctcaagcactcctgtattctcaccatatgttgtattagccggtcctccgatggctcctgcgaatgcagttgcaattccatcacctataagtgtcctatgaagacctggatcagcaataaagttctgctctactgtagcagaaatagcagacatgtcgccaatgtgctccatcatagtcgcaatagcgataggcgccataacaagaatggacgtaatatcaaacttcatgaactgaaatttaggtattccgacccacgcagatgatgcaattgatgtaaaatcaagaattgctgaaccatcaggattagtaattccagcagcattcataataaaagccacaacataggaaataattactcccatcagaataggaatgatcttaaataagccctttccccatatattgaaaataattataactccaagtgcaataattgcaagaacccagtttgttgaagcattattgatagctgagccggcaagtgaaagaccaatgcatatgataataggtcctgtcactacaggtggaaggaagcgcattacacgcttaattccaaccagcttaatgataagtgcaagtacgaaataaagcatacctgcaacaaatattccaccacacgcatacgcggccttatcattgacagccatatctgcatacataccactgtcaaggtttgcaacagtataaaagcctcctaaaaaagcaaatgacgaacccaaaaaagccggtaccttaaactttgtacacagatgaaatataagcgtgccaaagcctgcacaaaatagggtaaccgatacagaaagacctctggtaagcggctccccacaagccttctgaaaatatcctgatacaagaataggcacaagaattgttgcgccgaacatagcaaacatatgctgcaaaccaagaataagcatcttggccgttccaagctgtctcgcatcacgaattggctcctgtttcttttgttccataacaacctccttaataaattaatgttttcgataagtaaccgaaaacattatagcagtttttaattattatttcattattttttcattatttttttattattttttacaaaaaaaagacatctcattggatgtcttaaataattcatatttaataggtttgtaccttcaaaacttcatacaaatccgatttgtttttctcc

SEQ ID NO: 1500 - DNA, 529 bp, Unknown
  gut microbiota DNA sequence
agggcatatcgtaaaacacgagagccacgtttggacatccttgttgtcttagcctgaaagttaccagactgataaacagaaggatccaaaccggcaaaagcaagcagcttgttaggattggagaaacggtgaatatcacctatttcaccaagaatcattccaccattgatatatccgataccaggaatggtcatgatgacagaatcgttgaatctcatgatatccgtcatctcagcttcaatcttttctaattggctatccagtaactcaatttgttgaattgtctgagttatctgaatagatatagagctgtcgtttgcaccgacagacttctgtgcgagaactcttaattctttggcctgctctttagtaaagtgtccgtgcgagttcactttgagcagatttgccagatgagtcatatgcatggaagcaatctcttttggagaaggtgcttcttttaacaaagcatagacagcgtgctggtgcagaccggatttaaaaaagtattgaatttccggaaaaacctgat

SEQ ID NO: 1501 - DNA, 16205 bp, Unknown
  gut microbiota DNA sequence
tgcgaaataaaaaatttggagcaaatgttcacaaagagaataattttaatgtccttaaaacggtaggaatatatggaccaaacaatgctggtaaaacatgtctaatcaagtgcattagggcaataagaaatgtacttttaaacaagaagaatggactgatgccaaatatatttactgatagtgatgtatgcgagttaggtgttacatttatggcatctggaagaaagttttcttatgattttaagtatgatgcagaaaaagaagaatatatatatgagtcattttcggagatatttaaagatcagtacaacaacgaaaaggaagtttgttggttaaaaaaagatactgttagtgaaatatatgagtgtattgatgaatctgttcagaatatgatttcagttgtatcgaagaataatttgctatgctatgtggtagatacaagtaaattcgaacatatcaatgagatgaagcagattcttgtcggatttgcagaaaaaattgatatcatcaatatgaataacatacctatgcagcacacgattgaacttatgaagaataagaatcagttacagcaaaaggttgttgagttcataaaaaatgctgacttatatatggataattttgaatatgtggatatggataagatacagctgaaaactggtgaaggtgacgaaaagccagatgagaaagtgcttgatattccggagaacattatggatcaaatcagattggtatccacttataagggagtccatgtgccaagtatgatgtttgactccacaggaacaaagaagattgcagctattgctagctatgtaattgaagcacttgaacagggcagaattttagtcgtggatgagctggacagcagtattcattttaagctcaccagagcgattgttgccatgtttaataatgaattaaatacaagtgcacagatgatatttacggtacatgatattaaccttatggattgcaagagaatgttccgcaaggagcagatttggtttgttcacaaggatgaagaaggtgtatatgtatattctcttgctgattttactgcacagcagggagtacgagatacgacagatgttatggaaaaatataggaaaggtgcacttggcgctttaccagatccagagttgattaactcattgcttagtattaaaagtggtgtaaagggggatgatgccgatgccaaataagctccctaagtttttggataaccataaaatctgtattatctgtgaaggtaatgaggaatatgagtatctaaatcgattaaaaaatttaaaagtatggaacgagcaatatgatatttcattggtaaatgccggtggaaatggtaatatcccggcaaggtatcaggaccgatatcaaaatggagcagatgaacttgtacttgtgttctgtgatacggaaaagaaaccacatgagcagtatgaggatataaagcgtaaaatcaatgagtttcatggtgtggatagtgcagcgaaggaagtgattatatttggtaatccatgtacgatgcagattatatccaagcattggaccgatgaaaatctgaaatctccggcaaaaccagtaaatgctcctttgataaaggaatataccggagtagagaattacaaaggtagagcagaccagattcagaaagttatggaacatgttactgcggagaattacaaagatatgagtcaacgagtgagaaaactggattcggatgattctgttactggtagcagtaattttggaaagttcataaagctgtttgagagtgatgacagtagttggattgaggagattaatggatatttataaaataatttaattatgatcgatggaaggaatgaaaatattagcgaagaacatagaaacaaatatggcttaggtacaatccgaaatttgtcatcaggctgcaagacatttcttaatattgtgaagcatcctgataatgtggtaaatgttgaggaatgtggaccgaatgttcttagaattatttttactatggataatattaagatttttatgtcaagaccaacgctttttgatatcccggatgacgccaaaatcagatttaatgattctgatatagttataggcggcagaggatataatgcctggttgaaaggttgggaagagattgattttgaaactgtaagtaatgtggcagttcgtgaaattcagcaagtaattcaacagattattttatgcatgagatgaaaatgaataatgattatcagataaaagagcgatgtagtttatatacaccgctctttttgattggtatggtattttatttttctagcagtttgcgtgcatatgtaagtattctgccttctacattgctgtcctgcttgatcattttgatgagtgaataaagctcaggatcattggatgaagaaacaataatgtaatcaggatctgtcttatcagatgttccgtaaagaaaatctatgttgcaattaaatgtctgcgcaatgaaaccgactgtgggataagagggttcacgttgtccattttcatagcggccatataccattggtgagatattaaggcgacgtgcggcctctgctttatttatatttagagtatttctgagttggattaatctttcaggttgaaatttcataggtaagctccttcttaaaaatcgatattcaagtgcttgaatgtaatcataaaagattataaattataatttagcttttttcaatgtttacgttgacattaaccattggatatgataatatttcaataaccaatggttacacatatggatgaatagaggggaataaaatgaaacattatattgagattcaaagactaaggacacaagacgtggtcgttgatgatacgttgacacttgaaaaaaacacggatgcatttatacagggagatataatcagtatcactgagaaaaaagatggtgccaattcaagtatatattatgataaaaagctggatagactgagatgttttagcagtaaaaatgaacttgatttcagcaaccagttgagaggttttttgacttatgttcagagtctggatagggagccgtttattaaatatccgaattatatattttttggagagtggcttgtgagccatacggtcatttatgatgattccaattataacaaatggtatttatttagtgtgtatgatacagtttcaggcagatggctgtcacaggattttgtcaaaaaatttgcagaaaaaaatgatttttgttatccgcatgaattatactatggaccatttattagttggaaccattgtctcagctttgccaatgccccggcatatggcacgcagcaagagggaatcgtcataaagaatcagactgcactggagcaggagagaggtccgcatatattaaaatatgtaaatccggagttcaaggaaacgcagaagaagaatcataaaaagaaacttgaagatccgaataaattgaacgaaaaagcagaggcagaagagtatatacgcatgattgtaacagatgcaagggttatgaagtgctatcataagcttgttgatgatggaattttaccggagaaatttgaattgaaacatatgaagcatgttgcacaaaatctaccaaaggcggtgtatgaggattgcgtgaaggaggaattggagattttaaagaaagccggtgagtttggaggcaaactttgcggtaaggtgacaatggaaatgattaaagataaattgaagattggttgacttttttggctgaaattgttaggatataaatgaaagtttaccactgaccgatatgtggtatataaatggtcgggttgaaagtttaccactgaccgatatgtggtatataaatggtcgggttgaaaaagtcttttgcagtagtgcaagagactttttttgtggagattaacaaatgataaggaatggtttttatattatcaaagatagctttttttcggatatgtcggatccatatttgaaaggaaataaaaaacaaaatagaccacactactattgttttgaagatagcaattataatggaatatattggatgattcctctttcaagtcggattgataagtataagaaaatagtaagtaaaagaaccgataaaggaagaacctgtgatataattcacattgtgaaacttgatgatagtcatgaaagcgcttttctgatacaggatatgtttccaatttcagaaaaatatatagaacgggaatacactatagcaggtaatcatcttcgtttaaccagtgaacatgctgcaaaagaaattgaacaaaaagcaagaaaagttttgggaatgctgaaaagaggaataaaatttactccaactcaaccagatatacagaaaatatatgagaggctgcaacaggatttaccagcaacacatttgtaattttataataatccgggggtattttcactgtttccacctataatccccaaaatggtttaataacgtttactaacaatgcctattgtaaataaaagctatcatcattacaatagagattagaaatgctccgaacaatatgaaaggcataaaaccaaaatgaaaagacacacaaacataataatcacagccgtggcatcgctgcttatcgtcacacttgcgggcagagaattcattaaaaatcataagaaagagtctaatgataaatcgtctacgaatgtatcagaaaatacatgtgaagatatacctgacacaagtatatctgatacgtgtgtagctgatacgaatacacctgacacgaatacatctgaagcagatattctggatacgacctatgagaataataaagagcaattttatatatccgaaattccggatgatatttttgaaaaaatgcagggcaaatcatacaaggtagattgtacactccccagagaaaatctgcgatatatacatgtactacacgtgggctttgacaatcaggtgcatgaaggtgagctggttgtaaataaagatatcgcagatgatgtacttgaaatatttaaggagctctatgagtccggatatcaaatagaaaaagtcagacttgttgatgaatacgatgcagatgatgaggcatctatgagcgacaataattcatcggccttcaatttcagatttatctcccacactacaaagatatcgaagcatggaatgggaatggcggtggatatcaacactctatacaatccttatgtcaaaacagtcgatggggagctttcgattgagcctgcaaatgccgcagattatgttgaccggagcaaggatttttcgcacaagattgaccatgatgatttatgctataagctgtttacggagcatggttttgagtggggaggcgattggacgcattccaaggattatcagcactttgaaaaataatgctgataatttctacggaagcaggtgacctgccgccaggtacagctcataccattcctcgcgagtcagagtaatatcgcatgccgcgataatttccttcaggcggctttcgcttgaagttccggtaacaatctgcatatttgccggatggcgtaaaatccatgcggccgcaatagtagtatcgctgacattatatttttcggctatcacatgaagttttttattcagttccgggtattcgtcgcttccgagaaaacagcctttccatgccggcatctgaaacggagaccatgcctggagagtaatgttgtggaggcggcagtagtcgagcagacttccgtcgtgatcaattgaaccgagtgtttccatattgacttccataccatttgcaacgagattggaaacaggaatgctgaactgaacctgattgacaacgagtggttggcggacatatttctgtagcagttcaatctgcatcggcttatgatttgaaacaccaaaatggcgaacctttccgctttcaaaaagaacatcaaatgcagcggcaacctcttccggttctacgagtgcatccggacgatgaagcagcagaagatcaagataatctgtatgaagcctttttaaaataccatcgacagatttcagaatatgctcctttgagagatcatagaagccttggcggatgccacattttgactgcaggtaaatatcttcacgctttagggatggatcgtctgcaattgcttcgccgaatacgctctcgctcataccgccaccgtagatatccgcgtgatcaaagaaatatgcgccctgctccagcgcagcatgaataaaatgattcatctcatcctttgatttttcagaaaggcgcatgcatccaactgcaactgaaggaacctttcgtatgtgattgcctaagattgtttctctcataataaaaatctcctttgaaattattttgtattaacgttaagtgattattttctaattcccataatgagtgcggcgtagccccaatcccatatgagctttgcaaagctgttttccagatattcgcgtatgtcatcgtcatcatatccggtcatgcgtgagatgatgacaatatgctctctgatggtttcatatgtcaacggactattggcattgtgactgtaccacaagaaaagactttgacgtatagcagtgtattcaatcataatccactgcattttgataatcatgtgttcaataatctttttagtggatgctgcttcaggcgatatcaggtcggaaaacagctcgtttgccagataattgcgaaaaacaatgtcataatctgtgagcattgagcaaaattgtttctgcgatgtttgcaaggtgcggcttatggaattattgtctgactgtgaataaatattggagtatctacaagcctcggtcagtacaggctgaagaaaggctgtgtataaaccctctttacgataatttactgataaatcctgaagcagctcattgcattcgataaatgtatcttcgtccgggatatggatatcttccatggcggtattcagttcattaagcgtatgtctggaaaaatattcctgtatatgtgcattggtgattggctggtttttatataattccaataaaatgtaaagcccatcaagtaaagtctgctccactgaaagcccttggtcagatatcagtttaatcagattatcacggattaaaaatgccgtagataaattattctgggtctcggatattacaggaaatgtgacaggtttttcgcaccacaggtcgataactgccggacagcacggcatgagtgttcgttcctcatgtgttgaaaaccggtggatttctctgggaaacagtgcacatgtctctgaaagcacttcgtctgagtatgtcattacaagatgacatagcttatcctttgaaagaaacggacaccggtgtttttcgtccagtttaataaccagactgccatccttatggcatgtgtaagagcttagattgtcactttttccagccactttatcagcagaaaaaggggctgcagataaagtatccggaggagaaagcttcttccatttgcggtttgtagcgtcatctactgcaattttccactcctgacagcatgtgatactgcatttgtcagcaatacatttgaaattgttgtaatagtccggttgatagtttttcatgtttttcctttacttatattatacagatttgtgaatagagcatagtatagcttgttattatcaatcaattacatgatgattcagccattttcttgagtggaatctggcagtaaatataatagaacgaagcatccagtcacaagccatgccaatccacactgcaatcggaccaaagccccatacacggcagaggtatatgcataggcttacacggcaaagccacattgtgcagcaggatacaatcatggagaatttcacatcgcctgcggcacgcagtccatatggcgggatgaaggatggtacccagcagattggcttggcaattgtgataaaggtaatcatctcaaagcagagctttgcactggcaggttccattccagcaagcattgtaatgggctttgtgagtatgaaaataatcagacagctggcaatgattacgacctcagacaccagtgacagttttttgatatagtagacagcttcatcctttctgccggcacccagacactgtcctacaacagtcataagacctattcctattccgatagcggcaataccatttaagttttcgaggatattggtcatggcctgggctgcgatggccacggttccaagagtggatacagtagactggatagccagctttccaaactggaacatgctgttttcgattcctgatgggataccgatgagcaggatttttttaatcaggccccattcagggcgtatagacatatagttctttatgaaaatcggttcattttcccttcgaagctgtatgataacgacaatcgcgcagaatattcgggatacgagagtggaaatagcagctccctcaacacccataccgaagccgaaaatcagaatagcgttgccgccgatattcataaagtttgaaataacagatatgaccataggattgcgactgttattctgtgcgcgcataatggatgcgccggcatcatagagacctataaaaggaaatgacagcaatgtaaaaaagaaataaacctgtgagtttctcattacatcagcttcaacagcgccaaatatggcacgaagcagcgactttcttgttatcagacaaaaagcagataaaagtacagacagaaatgccatgacaaaaaatacctgtcttgcagcatggcgggcaccttttgtattgtgacttcccagatactgtgaacagagaatcgcaccaccggcggcaagcgctgaaagtgcctgtatgacaaggatattgattgagtctacaagcgagaccgctgagatagcggcagaacctacattgctgaccatcattgtatccacagttcccataagagaggccaatagctgctctattataatcggaaccaagagctttcgaagtttagtatttgtataaatatgattggttgtagtatgcaggtttgctgtttttattttatctgaatgtaaatttgtcatatatgattacctttataactgtatattttacgtgtttaggttagtacgataaattcgtaatgtcaataaggaatatttaaagtgctggcaaagtgttagtaataaaattatttaaaatgtcagtaacttctgttttttgaacaatattgcacaatcctcttttattttgaaccaaaaagttatacaatagtaccatagtaaaaggcatcaaaactaattccaaaattaaatcacgagaggtatcaacatgaaaaaagcaaagaaaccacctctgtacaaaagcttcggctatgccttcgagggtatatttacatgcatcagaaatgagcgcaatatcaagatacactgcactgtcgcgatacttgtagtgatagcaggagcggtacttgggataacaccgactgagtggtgcatctgcctgacgctgtttggactggtgatagctctggagctggtcaacactgcgattgagtcagttgtagatttggtaacgacagagcgaaagccgcttgccaagacagctaaggacacggcagcaggagcagtgcttgtggcagcaataatggctgcgatagttggacttatcatttttgtgccaaggattgtttctctattatgatgattaaaggtgtagtcagattatggcaatcaattttaaataacaggaaacggaggattttaccatggaaagacttacagacggattaaagaagattttacttgcaggaataggaacagtagcagtgactgctgagaaatcaaaggaagtacttgatgagatggtcaagagaggtgagctgactgtcgagcagggcaaggtgctcaatcaggagcttaagcacaatatcaaggacacagtaaagaaaaatgtaaatgtatctgttaagccacagtcaccggaggagctcgaggagcttttggacaagatgacacctgaacagatacaggctttaaagagcaagcttgcacagatggatgaggctgacgtggatcaagaagctgatgaaagcgttttcgaggatgaggacattgtaacagatacttcagccgatggaaaaagtgcttccggtggagaatcacagacagtggatataaaaatagaagctgaggacgataaagaggaaagcgtgaactagtatggatggccgcctgaaggagatgacagcggtacttaagaagtacaagctcacgcatggacttacacccgaaaaattcagacttatattgcaggagctgggacctacctatattaagcttggacagataatgtcgcttcactcggatattctgccaaaggaatattgtgaggagcttatgaagctatgctcagatgtggagccgatgccgtttgagcaggtggaggctgtcatagatgcttcatttggctattcatggaaggatgtttttgcttcaatagataaaaagcctcttggggcagcttctatagcgcaggtgcacagggccacacttaaaaccggtgagcaggtggttgtgaaggtgcaaaggaagggcattcacgaggtgatgtcaaaggatatggcgctgcttcacaaggcggttaagcttgtgccacccatctctataaagggcattgtggattttgacatggtgcttgatgaaatgtgggctgtggcacaggaggagatgaattttctgcttgaggcatccaatattgaggagtttgccggcaataacagggatgttgcatttgtagccacaccaaagctttaccgcaagtataccacatcacatgtgcttgtcatggagtatataaagggctttaatatcgatgataaggaggggcttttaaaggatggctatgatcttgaggagataggcagcaagctgattgacaactatatcaggcaggtgatagaggatggcttcttccatgcggacccgcatccgggtaatgtaaagataagggatggcaaaattgtctggattgatatgggcatgatgggaaggctttctgagcatgacaaaaaggaactgagcaatgctgtttacggcatcgccatgaacgatatcggcatgatagaggatgcggtgcttgcaattggtgactttaagggtgagcctgacagggcaaagctgtacaaggatatcaaaataatcataaataaatacggcagtctggatatgggacaggtcgatgtcgcagagtttattcaggagcttttggaggtaatgaagaacaaccgcattgttatgccgcatggttttacaatgcttgcgaggggcatcactcagatagagggcgtgcttgcggatattgcacctggcatcaacatggttgggattgcttctgcaaggataaggcaggagatgcttaagaattttgatttgaagggcgagcttaaaaaagccgggaagacagcctacaaatcagctcaccgcatggcagaactgccggataggctggcgcagatactcgaggaatatcaaagagggcagacaagcataaattttgacatgcatgcttctgatgagcttgcgaggcttttacacaggctggtgagaaatatcgtcatgggcttatgggttatggcacttctaatcagctcaagcatagtgtgtaccacagatatgacacctaagatacttggcataccggcgcttggtgttatgggatatgtgtttgcatgcatcatagtgctttatacgattgtgaagcatttcatatccagacgatgaaaaaaagcaggattctgaaattaatcagaaatcctgctttttaattacgttatattatttcgatgattttttactctttgcttttttataatcctcatcaagatgatatttgtcctgatacatggtgaactgacctacaaatgcaggctcctgtccggccttaagctcattgagataatcatgtgtctcgaatgatgagttgtgtgtctgaatcaggcatacagcaatgtttgagcagtgatccgaagctctctcacagtttgtgatgtaatctgtgaggaatacgccgagtctgctgtcacatttgcccttctgaagacgctcgatatgataatttctaatctccttggtgagatcgtcaataacctgctcaagcggctcaaccttgactgcctctgtcaaatcgtttttgctaaatgcctctacagtgagagtgagaatctcgcgcagagcattgttgagcaccgtgagctcttttcttgcgttctttgaaaattcaagcttgttgtcatcaatctgcttggcaagctttgccatatttatcgcatgatctccgattctctcgaagtcattgattgcatgaagcatctttgaaatctcgttgttgccgccctcagaaacatcctttccggataagtgaatgaggaaggtgtcaagctgatcctctaagtaatcaaggcgctcctccatgacttcaatatcatcaaactttgaatctgagtaattgtcaaagagatctaaagcattcttgaagctgtctcttgcaagctcagccatctcgtttgtcttctcaagacattctttgacagcaagtccaggtgagagtaaaagtctctcgtcgagtacaacctgtccgtctgcgttgtcagttgtgacaagcttcttagcaatctttacaagagtattgctaaatggcagaaggataatagtggtagcaatattgaagattgagtggaataccgcaatcattacaggagagatgctgtcattaaataatgtcagatcaacagcataacgtgcgatacagtatactacaagtcctattgctgtaccgaacagattgaagctgatgtggatgatggatactctcttggcgtttttgtttacgccgattgacgaaagcagtgcagtcacgcatgtaccgatgttctgacccatgatgatcgggatagccatgctatatgagatagcacctgtcatggctaaagcctgcagcacaccaactgatgcggcagatgactggatgactccggtaaatacagcacctacaagcactccgaggaatggattgttaaaggtggtgagcagtccggtaaattcaggcatatctgcgagtggtgatacagcgccgctcatgagctgcataccatacatgagtacggcaaaacctgccatgatgattccaacgtccttgcgcttttccttcttgcttcccataatcataatcacaccgataagcgcgatgacaggggagaagttctcaggctttaacatcgagatgaacagattgtcactttcgatacctgaaagactaagaatccatgcggtgagagtggttccgatgttggaacccatgatgacaccaacagtctgggcaagctccatgatgccggagtttacgagtccgacaagcataacagtaagtgcggatgaggattggattgcaatagtgactattgctccaaaaaataagctcttgatagggtttgaggttacctccttaagtatcttttggagattgcctcctgcgagcttctcaagactgcctgacataacatgcattccgaaaaggaaaaaggcaagtccaccgcataactgcaatatagagtaaatgttcatgtttacctccgtttgtaaaaataatttgttttactatttgctccagttatacatatttagtttacacaaaacacatataacataacataatttttacattctatcaatataatctgaaattttaataaaaaaagtgatattcacttttgaacacttttgaaaacattttaaaatttatgtatatttatgttttcttgtgtttacttttgaaggaaaacgttgtacaattacagtataataatttaaggtaattattcagaaatttacattacaaggtggaggtatattatgtcagacgtaaaaagtgttattgaaagcggcagggctgtgctcggaatagagttcggttctaccagaataaaggcggtgcttatcggggaggatcatgctcctatagccacaggtgcccatgattgggaaaacatgcttgtggacggcatttggacatacagccttgatatgatttgggagggcatttcagactgctacagcaaaatggcgcaggatgcaaaggaaaagtatggagttaccatcaaaaagcttgcggcaatcggtatttccggcatgatgcacggctatctgccttttgacaaggaggataatctacttgtgccatttcggacatggagaaataccatcacaggtgaggctgcagcagagcttactgaggtgcttggctttaatattccgcagaggtggagcatagcgcatctgtatcaggctatattaaataaagaagagcatgtatcaaagatatcatatttcacaacattggcaggctatattcactggcagctcacaggtgaaaaggtcatgggtgtcggtgaggcatcaggcatgtttcctatcgattcgaagaccagggattatgatgcggcaatgcttgataaatttgcagcattagataaggtaaaagaatatccgtgggatataagggacattctgccaaaggtgcttacggctggagaaaaggcaggtacgctgacagaggaaggagctaaaaggcttgatgtaagcggcaatctggagagcggtatattgcttgcaccgcctgagggagacgcaggcacgggaatggtcgcaaccaattctgttgcagtgcgcaccggaaatgtatcagcgggcacatctgtatttgctatggtggtgcttgaaaaggcgcttaaggcagttcatgaggagcttgatatggtcaccacaccatcgggagatgcggtagctatggtgcactgcaacaactgtacgtcagacttaaatgcatgggtgggattattcaaggaattttcagagctgtttggcatggatatagatatgaatgacatatatggaaagctctacaacaatgcacttacagccgataaggacggtggcggccttgtagcctttaaccttttctcgggagagcctgtcatcggactcaacgagggcagacctatgtttgccagaaagccggatgcaaggatgaatcttgcaaactttatgcgcacacatctctatgcaagtcttgcaacactaaaaatcggctgtgatattctctttaaagaggaaaaagtaaaggtagacacactttacggtcatggtggtctgtttaagacaaagggtgtgggccagagcatacttgcagcagccatggatgcaccggttgcggtcatggagactgccggagagggcggcccgtggggcatggcagtgctcgcagcttatatggtgaataaagcagatggagagcctttggaaaaatatctttcagacaaggtatttaatggcgaaaagggcatagtaatgcagccggatcctgacgatgtaaagggctttgatgagtacataaatacatataaggcagcaattgaggcagagcgtgccatggtaaaggcactcccgctgtaatagcagtaaaaaataataagagaggaacagaaaatgcttgaagaattaaagaaacaggtttacgaagcaaacatggagctcccaagaagagggctcatcacgtatacatggggcaatgtcagtggaattgacaggaaaacaggctattttgtcatcaagccaagtggagtggattatgatgtgctcacccctgatgatatggtagtcatggatcttgaaggaaataagatagagggaaaatacaagccttcgtcagacactgcaacacacttagagctctacaaaaagtatccggatatcggaggaattgtacatacgcactcacctgaggcagttgcatgggcacaggccggcagggatattccgctctacggcaccactcacgcagactatttccttggctcaattccatgtgcgagaaatctcaccacagaggaaatcaacgaagcctatgagaaaaacacaggccttgtcatcatagagacatttgagaacagaaaaatcaatcctgtatacacaccggctgtgctctgtcagaatcacggaccgtttgcctggggaaaggatgcagctgaggctgtgcacaacgccgttgtccttgaggaagtggcaaagatggccagactcacagagtcagtaaatcctgatgtgaagccagccccggacaacataaaggagaagcatttctaccgtaagcatggggctaacgcatactatggccagaactgatttgtagctgttatatgtggcataagtgccggtttccgtggtgcaca

SEQ ID NO: 1502 - DNA, 4702 bp, Unknown
  gut microbiota DNA sequence
tgcttagaataccttttgattgataattgaattaatttcaggccgtctgtccgttctgctcggttatcccctcatagagtataatttaaaattatcttataaaggggtaggagagcagacgtccaacggacagaatacggcctttactttctcagtgatacaacttttatatatttttcaagtggtgcatgataatttgattcgtctgcatcatttttttatctgcttaaaattccttttgtgctcaaaataaaattataaagccctgataaatctattctgtggtctcggagcataaggaaaaaaataactattgcaattaccaatatgtatttccatagtggttctttttgctttttccggttgtcttttggttttatgtgatatattttactcattggtgcagctccccttttttagaattataatttgttaaactgtaacaattttagcacatgagctcatatgtttaaattggtaaattttaacaaacatttattcgtggtattgacagattctaaaaaatgagtaatatgataattgtttaatcaatttaatcgtactgcaagcggagcggtactatttttagcggtatgcatttattcgctaaacacaagtttaacgaataaatgacggtttaattaaaatcgctcttatcgaacgacatagtacatcttgaattgatgcaatccgtaaatattaacttaggattaaagcttagcacaggaacatatatttgtaaacactttataaatattttgtgaaacatgcacaataaaagactctgaaccaacgtggatcagagccagtataatttatttatttgtgcattttgatgtgtgctacgcgctggcaagccttgagcgcgaagcacacacacagataatctaaggttcgctatcaagaaacctaacaatttcatcagtttcacgagaagcagaattttctacttgatattcttcaagctttgaaattctatcgttaagttgataaattgaatatagacaaccaaccaaaccaacaacacacaagaaaataataaaatccttacagtaatcttttttcataatgcaaaaccaccttttttattttcgattttacactatttcaataactttttcaagcgcctgcttctatgtattatctggtcattatcaggattcatatcaccacgcatctgcaatatttcttcctcactcatcatgtccccatcatcgacagactttttgagcttatcaaccacagccaatgtatcataagcattgtaatctttatccctgattaaaaatccagtacgtttacgtggttttataagagtcggattgcttgcgtattccacctcatcagcatcatattcattctggacaagaaagcgccatatcttttcacagttaatgcacttttgagtaaccgaacgcatgagagcatcagttagcttaaacttttggcttgaatacatgaaagatatatgataatgccttgatgttatcagagtattcaaaaatgacgcatcgatattagtcttgaaattcctactattgagctgcgcagatgcttcatcgagtaccactataactactgtccttgtgttattttttatgtcaatatctttatttttatacgcacagcagaccacctgcgacagactggcaagaggttcatatggaattgacttgaaatctacgttgctaatcacatgtattttttgccttacaaactttttcctgcttctgtcccagaccattttattattatactttctaaaaatcagagtgacataatgtacaatagatagcgttttacccccaccaaaatgcgcacaataacaattcaaaagacctgcttcatagaaattataacccttatgcctaatccaaaaatagaaatctttaactgcatacattattgtacttactggatgtaaacaaataattctgaatatgacagagagccacaacaaggccagaacaccaagcaaaattaaaaatcccattttatttcataccccctaaaaatccgcaggctgtagcgaataactcaagtgcaatcattaccacaataagcctgactataacatacacatctaacgtagtagacgagccaactataagattaacaataacatccattattttctaaccccctttaaactatgtgtgcgccatgacttcatgcaggaccaacaaaaggaaaataacaatataaacatgattatatgcacgtcattagatatagcatcaagatttgatgtataatctacagtctgaacagtagaaccaaccgcaggagtcgagctatcaatcgtgacaccttccgtattatcttctttttcgtcctgcgaaatactttcttcaccttgcgcatttagcacctcactattttcaattaattctgtacctggtacagcttcatatatttcagtagtatcaatattcactctaaaaacccccttataaatttgatgattaatatagctgcaagtgaaaatacaattacctgcgctatagttggatgaacactaccagaccacggcacacgcatatttagcactttaataataagcatacaaacattttgatatatttcatacaacatcttctaccccctaataaacttgacaacaattagaatcataaggagcgcaaaggcaatagccacaacttcaaggcaccaagagggcaagaatgagaatatatcagctatcattttaggaacatcaccaataccttttgtgaattcttctaacttgtcaaaagtagaattgttaccaccagatgcatcttgaatatctttattatcctgcttttcctcggctttttgtacattgtctttcgcatcttctggagtatcaccccatccagtaatctcagatgtatctttagatttatcatatccaccgtcagaatcagaaacaaaattatcattatcatcaaccgaatcagatgtatatttacccttatttttagaagaattatataatttaacccatgcaccatatttattatcttgagaaactatacgcagataccatatcggttcatattgatagttagcataagttgtcattttttcaaaaacatttggtttatgtgcattatttgttttgtctgcttcaactttatcattagcgcttttccagtcaatccatgtataattagacctatttaaaccttttatattattctctgctttccagtctttaataaaagtcttatgccctttatcctcggatttgatattgccactcttatcctgccaagcatacgagccgtataattgcaccttatacccacctttagaaaggtcaataccagaagttgtagaggaactatatacaataaccttatcttgattaattttagctaagtctgcattttcatcagcatcaatagcctcttttcgattagtaaaatatgtttccatctgcacattatcaagacagcctatttcaggatatgatttatcgacaggcttatacagatgcgaagaaccactaccactagtaacagagtcggaagtaccgcccgaaagaacctttagcaattcagcccagcacttgtcataaccatcagcagtaacgacataatcgcaattagatctaacatatttattggagtcactatctgagtcgtaagttgaaccataacagtaaatataggtaatagagtcataatccttagatgatgcaccaaaagcattatccatctgcataacaacttcaccaccgcgtgtgaccttgaattttgacttattataaaaatcaacagcggtactaccagcacgagtaataaaaccataagtagcatcattgaaagcaaatgaataaacagggtaatcagactgaacggaacaagtcatagaagcagagtaatcaccatcatatttattatcgccactatcttttgtaaaatctatgcttattacctttgcatatgtttgagcatcagctcgaacagcttgagagggcatcagagtaagcaacgaaacaacgagcatacacacaaaagaagccactctccgagcaatacgaatatttccatattttttcataagtcctcactttcataaattacaatagttaaatttaaaggacggtgcatagcaccgccccctacggctattggttacaattatttctttaactttctaaccacaccaatagcaataccaactacacctgcacagaagaataccatgagtgtagggtttccagtaatagttgtaataacagtacttacaacatccataagtgaaccaaccgcagttgtcatagagttaccacctgcctcagctattaacataagacatttctccttccttttttattttatagtaatatcagatatgaacgctttaccgctatatccgcaaccataagctactacacattcatggcctatcacattatcagtgattttgtcggctaaatcctcatacacaaacaacttttccaccgacttgccatgaacaccattaacactgtcattttcagtaaatacaacagcaccttttgtctttttcattggtatgaatcctactatcttaatcattctttttatcctcactttcaattctttcaatatcttctgatactcctaagcatccaagcgcaggagcatatttgtttaaaacatcccttatatctggaagcacaaccgcttcaaagagaagtttctgttccatagtatcgaaatgcgtgtag

SEQ ID NO: 1503 - DNA, 1154 bp, Unknown
  gut microbiota DNA sequence
tagtactgatgatacaatcactttaattatcagactttttttgatagagctgaatataaaccatctaaaaatcagttcttctaatatgggtcctataaatgcagaaagaatcataatagcccaataatgttctttcattgtcattctgagcgtaatttcatttatgctttgctcattatttccggatgacaaaataaacttcataataccacctaatattgtaaacaatactattacagcaaatgatttgatatatcccgaagctattgatttgatatcatactgtcttatctgttttatatctcttaaaatccctgttccataaaggctgaataaaataactatagctataagattccataaatagtttgttatcagatacgcatccgaataactcattgcttcaaataccgattgtataacaggcaatatgatatatttttttcctatcaagtaccaggccggaaagattatccagccaatataccatttattgttttcttttttcattaccatttctgctttcattgacttttattctgcaatgtttcttttttgaaatacagaaagagctatcaatgaacacgtaagaataactattgctgaagcaacctctcttatatcttgcaccacaatgactaacgataaaatttccaaagtaatactgatgcagcatgcagttctaatgatttttgcgttttcattttttattttatcatatgataatttccccacccatacaaataggacacagaacagaacaacatctaaataatgtccctttttcacaatattaaagaaatgtaatattcccatcaaaaatgcaaaaaatccaataatttgcatagataatgtatattttttatgttcttcgaaataactattttgaaacaatataggcacaataattatccatacaccacaaaataacaatagtctttccatattttacctcgtcttattttataaaattatcttgttgctaaataccctaagcctgctcctgttcctgcaacttcacggattttacttatcccaattttatatccgttatgtctgcagattgttgcaagacacgctgctccacagtcggttatatcgtgctgttttatacaatagtatttcatcatttattgttccttttcgctatcgct

SEQ ID NO: 1504 - DNA, 98441 bp, Unknown
  gut microbiota DNA sequence
aactatattatattacttataagtaatattttcaattgtttattgtaagaaaattacaaaatatgtagatgcagtggtggtgcctggcaccattaaatttttatattctttattgtggcaatgaaatcagcagttgctggacagaaatgagagctgaatttggacaaggtaagaaatcataaatattgtattttacatggcaatccgctatactagagttaagtatagcggattattttttggaggcttttatggcaaatactttgaagttaccggttggaattgaaaattttgaggaaattcgtaaactggggttctattatattgacaagacaaggcttatagaacagcttttacagggatggggaaaggtgactctttttacacgtccaaggcgttttggaaagacactcaatatgagtatgcttaggagcttttttgaaataggaatggacaaatctttgtttgacggcttatatatttctggcaacaaagtactttgtgatgagcatatgggtaagtatcctgtcatatttctttcattcaagggtgtggatggtttagactttactacggcaagacgtatgctgtgtgctattttaaaggatgagcttgacagacattactatttgaagaccagtgatgtattgactgatgaggatagaatactgtttacaaagatgcttcatgggcaggatgacaatattgaggatagtatacgaatgctttcaaagctgttgtataagcactatggtcagaaagtagttattctcatagatgagtatgatgtgccactcgataaagcttttcagaatggctactacaaggagatggtttctctcatcagggggcttttcgggcaggcgctcaagaccaatgagtttttacagtttgcggtgctcacgggctgccttcgcgtgtcaaaggagagcatttttacagggctcaataactttgaaatcaattctattgtggatattgaccatgatgagcagtttggctttactgatgatgaggtcatgaaacttctttatgattatgacaggagcgagaggtacccggacgtaaaggaatggtatgacggttatcattttggtaatgcggatatttattgtccatgggatgtgataaattttgccaagaagcttgtttcagatccgtcagccagaccgagtgcgttctggattaacagcagtggcaatgatatggtgaagcgctttgtggacaaggctgatcagaccacgagagatgagattgagaagctcgtggcaggtggatttgtggagaagcagcttcggcttgatctgacctatgatgagattgacaatacgattgacaatctgtggagtgtgctctttactacaggctatctcaccaaaatcggagaggtcaaggtgcctgacagtgagagatatgcctataagcttgtgattcctaataaagaggtgcgtgaggtgtttattctccaaattcaggagtggttcaaggctgttgttgcaaaagatgatgatactatgaagcttttatcaagggcaattctggataaagatgagaaacagattgccaggcagctaaacatcgtgatgagccgcatgataagtatactcgatacaaaggcgcctgatgctatgaaggagaatttctatcatggcttacttcttggtctgcttcgaggcagcaatccggactggcttatcaagtcgaatcgtgagtcgggagatggttttagcgatattttaatcatgccggaggatcctgatgcgggcatcgttatagaggtgaagtatgctaaggagatgaaggaacttgacgcagcgtgcgaggctgcgataacgcagattaaggacaagcgctatgatgaggctctgcgggatgaggaccggtgtgatattttagcctatggcattgctttttgcaggaaacggtgcagggtggttggagagaaattttaaattggctgtaatcgttgctggtcacactgttaggtgtgaacagtaactatctgggatgttgcatccggtaatgaaaaatatattgctttcgtagtcaaagtatgttacgatactccatggttacaaattacagtgacagttattatatcatttaaacaaaagaaaggtaggagaatagttatgagcgacaacttcaatatgtatgatcaggcgaatcagcagggcaatccaaatataccgcctatgccgccgatggaggaaaagaagggaatgtcaattgcatctatggtgcttggtattatcggtctggtattctggtgtattccaatccttggcggacctattggtattgtaggacttatcctcggtatcgtaggcaggaaaaagggtggaaggggcatggcaaccgctggtattgttatgtcaattattaccatcgtacttgcagttatcaatgctattgctggtgtttatctgcaaacatcaaatgtcttgaaccagttataatcacataacaggtgatatctttaattgcattttattttttaatccgctatgccagaggttggtatagcggatttttagattcaattatcattgtattaaaataaaaaagtacgtattaggaaaggtggaaaataaaatgaaaaaacgaataattaattatagacttaagattgacaatctgcttgccaatcctgataagatatcaaaagaagagtggaagaaaatactgcaggaacacctgacacaaatagccttcttccagcatgagcgccttgtgcacctcatagtgacagtaacctttgctatactcaccatgatgtcaataatcgcatccatcatgataagcaacccaatgcttcttgtacttacactgttattcctagtgctgttggtgccatatatcatgcactactatacactggaaaatgaagtgcagaagatgtatacccaatatgatgagattttaaagcatttgtcctagctagcaagcatataagcgagtgcaacgagcaacatatacacatataaaagtagaaagttatcaaagacagaacccggcgcagccgaggctttttgcccttgcccgcatatacgaagctgcttagagtctgtagaattgcatacgaaaaccaacaacgcccatgcatgaatgcatgggcgaattttttacttcttaagcttcttctgtgccgtagaaagcatcagcttaatacggttcagctggttcacctcagaagcacccggatcataatcgatagccacgatattggcatccggatgatcatgtctgattctctttataactcccttacccacaatatggttcggtaagcatgcaaaaggctgtgcacagatgatgtttgtgacgccctcattgatgagctcaagcatctcacctgtcaagaaccagccctcaccggtctgattaccgcaagaaacgataggagaagcatactctgcgagatcctgcacgtgagcggttggctcaaaatgcttgctcttagccagctcatcccttgcatcctttctgagccactcgaagaaggcgataagtcggttgttcataaacttagctttcttagaagcaccgagatagtcagccttgaaattcgtgttgtagcagcagtagagtaagaaatcagtcagatcaggcactacagcctcggctccttcagcttcgagcaggtcaaccacatagttgtttgctgcaggcaggaatttgacgagaatctcaccgaccacgccgacacgcggcttaacttcatctgtcataggcagattgtcgaaatctcttatgatttcgcggcacatcttcttgtatttcttgtgagagagcatctttgtattgccgacaaagtcgatgactctctttttccacttctcatggagtgcattggcacttcccggctctttctcataaggacgtaccctgtagagacagcgcataaagatatcgccaaactcaagtgcatacagtccgtgctggatgaggcttggagtaaacttaaagcccgggtttttctcgagacctaccatgttgattgagataacaggtacatcaggatatccggctttttcgagggctctacggataaaaccgatgtagtttgttgcacggcatccgccacctgtctgtgagatgaggatggctgtgtgtgtcatatcatagttgcctgatttgacggctgccataatctgtcctacgacgataagtgaagggtagcaggcgtcgttgtttacgaacttaagtcccacgtccacacattcccttgcagggatatccggtatgaccatattgtagccggctgccttaaaggccggcacgagaaggtcaaagtgtataggtgacatctgagggcagatgatggtgtagttgtcctttttcatctgctcggtgaatacaacacgctcgtagttagacggttttaagtcacgcttttcatgcttggcttccttgactcttatggcggcaaggagcgagcggatacggattcttgctgcgcctaggttgtttacctcgtcgatcttcaggcaggtatatatcttgcctgagcctgtcaggatatcgtttacacagtcggttgtaaccgcgtcgagaccacagccaaacgagttgagctggattaagtcaaggtcatcacgggtctttacaaagttggctgctgagtacagtctggtgtggtacatccactgatccattacgatgagtggtctctcaagctcgcccagatgggatacggagtcctctgtcagcacacagatgccatagcttgtgatgagctcagggataccgtggttgatttccgggtccacatggtacggacggcctgcgagcacgattccgcgacgtccggtgtcttccatgtagtcgagcacttcctcgccctttcgctgtatctcaagccttgtcatggcaagctccttccagcctgcggctaccgcatcacgaatctgtgactcaggcaggttgaaatcgccttttgagaaggtggctacgagctgctgtgagatagtttcctcactctcaaatgacataaacggatttatgaatttaacctcgcctgaggtaatctcgtccacgttgtttttgatattctcagagtatgatgtgacaatagggcagttgtagtgattgtttgcatcaggaaactccttgcgctcatatggcactgccgggtagaaaataaaatctacattttgttttatgagccagcttatatgaccatgtgtgagctttgcagggtagcactctgactcacttgggatggagtcgatacccatctcataaatctttctggtagactgtggtgacagcactacagaaaagccgagacgtttgaaaaatgtagcccagaacggatagttctcgtacatattcaaggctcttgggatgccgactgtaccgtgtggagcatcctttgggtcaagtggctcatagtcaaatatacgtttgttcttgtattcaaaaagatttgggatgttatccttgttcttctccttgcccagacccttttcacagcggtttccggtgatgtactgtctgttgtcggagaatttgtttatagttaaaagacagtggtttgtacagccctgacagcgtgcgagctttgtggtgtaggtgagctcgtttatctggtcgattgtgagcattgttgtcttgtaatcagcctcatggcgctcgcgtgcgatgagtgcggcaccaaaggcacccatgatacctgcgatatcaggccttgtggcatgtacacctgcaattttttcaaagcttctaagaacggcatcattgtagaatgtaccgccctggactacgatattttcaccgaggtcgcttgcatcagacagcttgataaccttgaaaagtgcattctttattactgagtaggcaagtcctgctgatatatctgcgacagatgcgccctccttctgggcctgttttacctttgagttcatgaaaaccgtacatctggttccaaggtcgataggattctttgcaaaaagggcttcctttgcaaaatcctgaactgagtagtttaatgactttgcgaaggtctcaataaatgagccgcagcctgaagagcaggcctcgttgagctgtactgagtcgacagtctggttctttatcttgatgcacttcatatcctgtccaccgatatcgaggatacagtctacctttgggtcgaagaatgctgctgcgtagtagtgggctacagtctcaacttcgccgtcgtccaattttaaagctgcctttaataaagcctctccgtagcctgtagagcaggagtgtacgatgtgtgcatcctcaggaagctttgagtaaatctcctggatagaacggatggctgtcgcgagagggcttccgttgttgttgctgtagaatgagtataaaaggtctccgtcctcgcttacgagagcgattttagtggtggttgagcctgcatctattccgagatagcagttgcccttgtatgtagaaaggtcaccggtctttacgtgattgttgccgtgacgtgttgtaaattcatcgtaatcagcctgatccttaaaaagaggctccatacgtgccacctcaaattccatctttatgccgtttgagaggcggtcgattaaggatgagagtgtggtgacagagttgtctttatagtttaatgcagagcctattgctgcaaacagatgagagttctcaggaacgatagtgtgctcatcatcgagatttaaggttctgataaatgctgatttaagttctgacaaaaagtgcagaggaccgccaaggaaagcaacatgtcccttgattggtttaccgcaggcgagaccactgatggtctggtttaccacggcctgaaagattgaagcggataaatcctcgcgtgtggctccctcattgatgagaggctggatatctgttttggcaaatactccacagcgggctgcgatagggtagatggctttgtagctttttgcgtattcatttagtcctgtagcgtctgtctggatgagagaagccatctggtcgataaatgagcctgtaccgccggcacatatgccgttcatacgctgctctacgttaccaccctcgaagtatatgattttggcatcctcgccacctagctctattgccacatcggtctgtggagcatagtgtgtgagtgcggtagatacagctataacctcttgtacgaatggcacctcaaggtgctttgcaagagtgagtccgccggagcctgttatcataggacaaactgaaagatcacctgtcttgtcgtaggcctttctgataagggactcaagtgtctcctggatatttgcaaaatgacgctcataatcggaaaagaggatattgtcatcggcgtcaagaagtgcaatcttgacggttgttgagccgatatcaatgcccaacttatgtaagctgttattttccatagtggttcctccataatgtattacttatatgtttttatatatctttcttcttattaaaatatataattgttctattttcaaaacagagattattatacgacagatatcgacaaattacaatgactataattataaagaatttgtgaataattcgcagtctcgttgacaaagtatgatttaactatcataataaattttgtaataaccgctgccctttgcactatagtgtaaaaggcagcaataatatgacaggaggatgcagatacgtggttttattgcatcgtgatgtaaccactgcttgtcacataatggtgtgagcagcagtgaaatgaaccatgtctgctaaaatgtatgaactggcttaacaaactagaacaaaaatatggaagtaaagcgattccgaatatcactagaatatttatcgctgcgaatctgataggcagtgtgctgcttttgacaaagggagatgttgtcctttattatctgcagttttcagcttctgctattttgcacggacaggtatggcgtcttataagctggatttttgtgccgagcggcagcatatcatttttacagcttttatttatattctgtctgtggacgcttggagacagcatggagtcatatcttggctcttttaggatgaatgtgtactttttcggaggctttttgctgtatgatatagtaggaatgcttgcatttgcagtgacacatgtatccatcaatctgactatgtactatatacttatagctatgtatctgatgcttggtcttttgatgccggaggcagaggtgaggctttactttgtgcttcctataaagatgaagtggatggtgcttgtttacttcgtgatgtttgcatatgatgtgtatacctatatgagctttggatggcagattggattggcatacggctcagaaatcgtacttgcacttataaatctgttggtattcatttatggctgcaagcacaggctctcattcagacagaatatgcaccagaagaggagaaaggcacagtttaaggctcagttttccgaacctcgcccgggaagtggcatctcacgtcacaagtgctatatatgcggcagaacggaattgtcaaatcctgaattaacattcagatactgctcgaagtgcaccggcaacaaggaatactgtcaggatcatctgtttacacatacgcacgtataatatacatgtactactttttctaattcattgacaaagtaaactgatgaatttataatggacacagtattattttcggaggatcatttatggagaacgaggcaacagtttcgaaaaattttattgaacagattattgagaaggacttggcagagggtcattgcaagacagtaaagaccagattcccaccggagccaaacggttatttacatatcggccatgcaaagtctattcttttaaactatggactggcaaagaagtatgacggacagttcaatctcaggtttgatgatacaaaccctaccaaggagcgtctggagtttgtagagtctatcgaggccgatgttaagtggcttggtgctgactgggctgacaagaagttttttgcatccaattatttcgacaagatgtatgagtgtgcagtaggactgataaagaagggaaaggcatatgtatctgatctgacacctgatgagataagagagtatagaggtacactcacagaggccggcaaggaggatccatactcaaagagaagtgttgaggaaaacctagacctttttgaacgaatgaaaaacggtgagtttgaggatggcacaaaggtacttcgtgcgagaattgacatgagctcttcaaacatcaatatgagagatccgattctttaccgtgtggctcatatgacacatcacaatacaggtgataaatggtgtgtatatcctatgtatgattttgctcatcctatagaggatgctattgagggcatcacacattctatatgtactcttgagtttgaagaccacagaccgctgtatgactgggtggttattgaatgtggatttaagaattctcctgaggagtcgccaaagcagattgagtttgcaaagctctatctgactaatgttgtaacaggaaagagatatatcaagcgtcttgtggaggacggcatcgttgatggctgggatgacccaaggcttgtttctatagcagcgctcagacgcaggggcttcacaccggagtctatccagaattttgttgatctgtgtggtatatcaaaggctaacagctctgttgactacgctatgcttgagtactgtatccgagaggatttaaaggctaagcgccctcgtatgatggctgtgcttgatccggtcaaggtgattatcgacaattaccctgaaggacaggttgagtatcttgaagtggacaataacgtggagaatcctgagcttggaaagagaaaggttcctttcaccagagagctttatgtggagagagatgacttcatggaggagccaccgaagaagtatttccgtatgttccctggcaatgaggtgcgtttcatgaacgcttattttgtgaagtgcaatagctgcataaaggatgaaaacggcaatgttacagagattcactgtacatatgacccggcatcaaagggtggcaacagtcctgatggcagaaaggtcaagggaactatccactgggtttcagccgagtatggaaagcaggtaactgtacgtctttacgagaatatcgtaaatgaggaacttggagtgtacaatgaggacggaagcttaaatcttaatccaaattcactcacagtgcttgataactgtgtagtggagccggagcttatgaatgccaaggcttatgacagcttccagtttgtcagaaatggtttcttctgcgcggattgcaaggactcaaaggatggacagcctgtatttaacagaatcgtctcattaaagagctcattcaagcttccgacagctaaatagtttttgactaaaaataaacagaagagaagaatagaggtaaaatatggatttaaagtcaggtattgacaaattcggtttaaatcctgaagacataaatgatctgtatgatgaggatacagcagctgccaccggggatgctccggtggcagctgctgttcagacagaggatgaaacggattttgtttttgcaaagaatataacatgtccggtgtgtgatcagagttttcaaacactgacggtacggacatcaaagatcaggtttgctggctctgatgatgatttcagaccggtttacaagggaattgatacaataaagtatggtgtcacatcgtgtccgcattgtggttatagtgcgatgaatggcgactttgtacatgtatcgagtacacagataaggctgcttaaggagcaggttgctgccaaatttaagcccggcagcaagtcggtgcctttgttatattcgtatgatgaggcaatagacagatttaagctggcacttttttcagcgattgtcaaaagggctatgtatagtgaaaaggcatatatttgtcttaagctatcctggctttatcgcggtttaatcgaacagcttacggctgatggtatctcaacggaaagtgaagagcttgtaagtgcacaaaaggcagaaaaatattattataagcaggctcttgatggaatgacaagagcggttgcgactgagcatttccctatatgtggtatgaatcaggatacggttgatttgcttttggctcagatgaattataagcttgaccattgggatgtggcttcaaagctcattgcaagggtgcttatatcaaaaagtgcttctagacacattaaggataaggcacttgatttgaagaatgaaattattaaaaaaataagagatgtgaaataattgctgttatttcacatctctttttcttttatttgttgtaacaattaattatttttcttgttctcaagctcaagaagcttcattgcacgaaccttgagtggcagaccaaacagtgtgatgaagccgtctgcatcatggtgatcatataaatctcctgtagtaaagcttgcaagagactcactgtagagtgaatatggtgaagtagtgccggccttgatgatattgcctttatataatttgaatttaacttctccggttacatattcctgtgttgactctacgaaagcctggattgcttcacgaagtggtgtgaaccattttccttcgtatactacctgagcgagcttgttgcccatttcttttttgacctccattgtggcacggtcaaggcagagctcctcgagctggtcatgtgcctccatgaggattgttccaccgggagtctcatatacaccacgtgatttcatacctactacacggttctcaacgatatcgatgatgccgatgccgtgcttgccaccgagacggttgagctctctgatgatgtctgctaccttcatttttttgccgttgacagatgtaggaacacccttctcaaatgtcattgtaacatactcaccctcgtcaggagcatgctcaggtgtgacgcttaatacgagcagatggtcatagtttggctcctgtgaaggatcctcaagctcaagtccctcgtggctgatgtgccagaggttacggtcacggctgtagcttgaatctgtgccgaacggaaggtcgattccgtgtgccttacagtactcgatctcagcctcacgtgaatccattttccagttgtcctgacgccatggagcgattaccttgatatcaggagcgagcgccttgataccgagctcgaaacggatctggtcgtttcctttaccagttgcaccgtggcagatggctacagcgccttcttttcttgcaatctctacaagcttctttgcgatgcccggtcttgccattgctgttccaaggaggtatttgtgctcataaactgcgccggcctgtacacaaggtacgatgtagtcctcactgaactcatcacagatatcctctatgtaaagctttgaagctccggataatttagctctctcatcgagtccgtcaagctcctctccctgtccgcagttgatgcagcagcagattacgtcatagtcataagtctctttaagccatggaatgatagcagtagtatcaagtccgcctgaataagctaatacaactttgtctttcataagtgcgtgtcctcttttcgtttattctttatgatggtaaccattaactgcttttgtgtctaaaagccttgaataattactttagaataaatatataccagttctttacatattgcaagtgaaaaaatatacattattcatgtataattatacacaattttgtataatttttctctttacggattgaaattactgtactatattattatgtatgatgcgtcagacccattttatatggttatgcagaaatacaatatgaaaagaggaaatactatgataaaggctggtattattggagccaccggatatgccggagcagagctcgtgagaattttgatgaatcataaagaggtagagattgcatggtatggctcacgaagctatgtggatgagaattatgccgatatctatggaaatatgtttcagatagttgatgcaaagtgcatggatgacaatatggaggagcttgcagagtctgttgatgtgattttcactgcgaccccacagggctttttggcaggcgtgctcactgaggatatattaagtaaggtaaagattgtcgatctgtcagcggacttccgtatcaaggatgtagccacatatgagaaatggtacaagattgagcacaagtcgccgcagtttattgatgaggctgtatatggtctgtgtgagataaacagggacaaggtcacaaaggagacaaggcttgttgcaaatccgggctgctataccacatgctccatccttacagcttatccgcttgttaaggagggacttattgatacagatacacttatcgtcgatgcaaagtcaggcacatctggcgcaggacgtggtgcaaagacacctaatctgttttgtgaagtaaatgagagcatgaaggcatatggcgttgcttcacacagacatacccctgagatagaggaacagcttggatatgcggcaggaaaagaaatccttatcaactttactccacatcttgttccgatgaacagaggaatcctcgctacagagtatgcgacacttaagaaaaagcctgacggaacacttcctacatatgatgagattaaggcagtttacgataagtattatgcaaatgagaagtttgtcagagtgctcaaaaaaggtgtctgccctgagacaaagtgggttgagggcagcaactatgtggatgtaaactttgtgattgatgagaggaccggcagaattattatgatgggtgctcttgacaatctggtaaagggtgctgcaggacaggcggttcagaatatgaatctgttatttggcttcgatgaggcagagggacttaatatggttcctatgttcccgtaataattaataataggaaaataattatcagaaagatgcattataatgctgatagttatataaaaatataaggatgatttaataaaatgagtaatgagaataaatatgaaataagggttatgacgatagatgactatgacgaggtgtacagcctctggcagaccattcacggctttggaatccgttctattgacgactcaagagagggagtccttagatttcttaagagaaatccgactacgagtgttgtagcggtagaagatggaaagatagttggagccatactctgcggtcacgatggcagaagaggctgcctgtatcatgtatgcgtggatgagcattacagaaagtgcggcatcggaaagagtatggtggttgcctgcatgagagcacttcaggcagagcatatcaacaaggtgtcaatcatagccttcaaggtgaatgagcttggaaaccacttctggaaggaagagggatggacattcagagaagacttaaattactatgatttcacacttaacgaagaaaatataacaagatttaacaaataaggagcagtacaatggcagataagaacatggaacaggtaatggaaaaggcacaggtgctcatagaggcacttccgtatatacagagatttaacagaaagattatcgttgtaaagtacggcggatctgcaatggttgacgaacagcttaaaaagcaggtgatccaggatgtcacacttctcaagctggttggcttcaagcctatcatcgtacacggtggaggcaaggagatcagcaaatgggtaggaaaggtcggcatggagcctgtatttgtaaacggactcagaaagactgatgccgatacaatggagattgccgagatggtactgaataaggtaaacaaatctctcgttacacttgttgaggagcttggtgtgcaggctgtcggagtgagcggcaaggacggtggcctcttaaaggtaaagaaaaagtattcaaacggagaggatataggctttgtaggagaaatcactgatgtcaatccaaagatactttatgacctgttagagaaggacttccttccaatcgtgtgtccaatcggtcttgatgacgaatataatacatacaatatcaatgcagatgatgcagcatgtgctatcgccagagcagtttcagcagaaaagcttgcattcctcacagatatcgagggtgtatacaaggacccttcagataagaatacacttatttcagagctcacagtctcagatgcaaagaagcttataggtgatggctttatcggcggaggcatgcttcctaagctcaacaactgcatagatgccattgataacggagtttcaagagtacatattcttgatggacgtatcgcgcactgcttactgcttgagatattcacaaacagaggaatcggaacagctattcttggagattcggaggagaaatttaacaatgagcaataatatggataaacagtcatacattgatgaggcagaaaaggagcttcttcacacctacaacagattttcacttgtacttgatcacggcgagggagtacatctttatgatacagatggcaatgcatatctggacttcgctgcaggaatagccgtatgtgcacttggatacagcaatgagcaccacaaggaggcattaaaggcacaggttgataagcttttacatacatcaaacctctactacaatgcgcctgtcatcgaggcggcagacaaggtgcttaatgcaagtaaaatggaccgtattttctttacaaacagtggtacagaggctattgagggagctatcaaggctgcaaagaaatatgcctttacaagagacggccatgcaggtcatgagataattgccatgaaccattccttccacggaagaagcatcggagcgctttctgtcaccggcaatgcacattatcaggagccgtttgagccacttatgccgggcgttaaatttgcagatttcaatgatttagagagcgttaaggctcaggtgacagacaaaacctgcgccattattatggaaactattcagggtgagggtggtatttacccggcaaagaaggagtttatcgagggagtgagagctctctgcgatgaaaaggatattcttcttattcttgacgagatacagtgcggcatgggcagaagtggcgaaatgttcgcatggcagaactatgatgtgaagcctgatatcatgacctgtgcgaaggcactcggctgtggtgtgcctgttggtgcatttcttatgacacagagggtggcagacaaatcccttgcaccgggagaccatggcaccacatacggcggcaatccgttcgtaggagctgcagtaagtgcagtgtttgatgagtttaagcgtcttgatatagtaagccatgtaaaggaggttgcaccttacctggagaagaggcttgatgagcttgttgcaaaattcgactgtctcacagccagaaggggtatgggactcatgcagggcgtggagtgcagccttcctgtaggaaaggtctcagcagaggctttaaatcaaggccttatagtcattacggcaggcagcaatgtgcttagatttgtgcctcctcttgttatcgaaaagagtgatgttgacgaaatgatagaaaaacttgaaacaacacttgtaatactgtcaaaaagtctgtaaaataaagaggacatcgatttctcctttgagattatgatattaatcaaaggagaccatatgaaaaaaataatattattatgtgcgtttattttaacaatagcgtttggcctttgcggctgtaaaaaggatgatgccacagttcattttgcttctgaaacggagcagactgctgtggtttcaagtgatgtaaacagacatactgctgattccaaggagaagaaagcttcatccgatggagaacaggagcagaaggcaaaagacacagcagatgacactgatgaatctactgagtggtgcgtctatatctgtggtcaggttgccaatcccggtgtatacagagtaaagccgggcgcgagagtttgtgagctcgttgatatggctggaggcatgctggatacagctgacaaaagcttttggaatctggcatcagagctgtatgatgggcagatgctgtatttcccgactgtagaggagcttaagtcggatcacatacctgagggcacatataccaccggcatagatggctcgctgatgaagggcggcgctgaggagcatataggcgtaaaggatggcaagctcaatatcaataccgcaactgtcgagcagctaatggctctttccggaattggtgagagcaaggcaaagagtattgttgaagatcgcgccaaaaatggattgttttcttcgattgaggatatcacgagggtgtccggcatcggtgaagcgatgtttaataaaataaaagatgatataacagtaaattaggagtgtataaatggcaaaaaaagtgctggtcgttgacgacgaaaagttaattgtaaaaggaatacgtttcagtctgctgcaggatggcatggaggtagactgcgcatatgacggtgaggaggccttaaatatggcgaaggccaattcatatgatatgattcttttagatgtcatgcttccaaagatggatggctttgaggtgtgtcaggcaataagggagttttctgatgtcccgattgtcatgctcactgcaaagggcgatgacatggacaaaattttaggacttgagtacggcgctgatgactatatcacaaagccatttaatattcttgaggtaaaggccagaatcaaggcaatcatgcggcgcacttcaccggaacgcgcaccacaggtacagtcatctgtaattgaaaagggtgatatcaagctcgactgtgacagcagacgtctgttcataaatgataatgaaatcaatttgacagcaagagagtttgaactgctcgagattctgatcaaaaatgaaaataaagtgtacagtagggagagccttttaaagattgtatggggcgaggattacccgggtgacgtgcgtacggttgatgtgcatgtcagacgtcttcgtgaaaagattgaggcaaatccaagcgagccgaagtacgttcataccaagtggggtgtgggatattactacaaccagaagtaatactttcagaaaggttctaaaatgtttaagagtaaagtacattttgcattttataagagtctgaaatccaggctgattttcatgatttttgttctcgttctggtaccggaggtggtgctgtgcttcggcatacttaacacctacgagtccagagcggtttcaatccgcgaaagtgaagtgcttagtcaggcaaagattctcgcaaacaagatatccacaagtaaatactttgataaggatggcagtgacttgagcaatattgatgctcagattgacactcttactactatatatgagggccgtgtgctcatagttgacaagcattttaagattattaaggatacgtacaatttagatgatggcaatactattgtctcagaggaggttatcaagaccttctctgcttcagagattacaaactacgattctaaaaaccactatatcgagctttctgttccgataagcaatccaaacgacaaggattcaaagatagagggagcacttgttgtaagtgtgtcgacggacaatatatcgctaaatatgtcgtatctgacacagattgctgtgacggttgctattatcgcaggtgcggtggtgctcttttttggtgtgcttgtgcttttgcacctttttgttccgattaagaagctttctgacgagatatcagacattaaggatggctttggaaaagagcagctggatgtagatgactatgcggagactgctataataagcaggaattttaatgagctgatgagcggaatgaaggtcatggatgagtccagacaggagtttgtatcgaatgtgtcacatgagctcaagacacctcttacttccatgaaggtactcgcagattccatcaacagcatgggtgatgaggctccgattgagatgtacagggagttcatgggagatatcacaagcgagatagacagagagacaaagataataaatgacctgttatcactggtcaagatggataagtcggctgccacgctgaatatcgagagtgttaatatcaatgacctgctcgagcagattatgaagagacttcagccgattgctgacaagcagcaggtggagcttgtactcgagagcttcagaccggtaactgcagagatagatgaggtgaagctgacactcgcttttacaaaccttattgagaatgcaatcaagtacaatgacaacgagaccggtggctatgttcatgtatccttaaatgcggaccatcagtatttctatctgaaggtggaggacaacggtatcggtataccggaggagtccttagagcacatctatgagagattttatcgcgtggacaagtcgcattcgagagagattggcggtacaggtctgggacttgccattacaagaagctctattcttatgcataggggagctataaaggctcacagtgtgatgggagagggcactacctttgatgtgcgtataccgctcaactatattgtataggaggcttgacgtgaaaagaataattatattcgttctcactgcagtaattctgctctccatgggcggctgcacaaagaaaaaagcagataatacggttgaggtgttttgtctgaatatggatgttacgagcagcgtgccggagtcatatgtgcttagaagcaaaaactcagatgtggacaagcaggtggatgagctccttggaagactgcaggataagcctgaagactcaagactgcgtaaggcgattccggatgaggtgtctgtgagaggtcatgacgagaaaaactataactgcactgtggatttcagcaaggagtattatgaccttacggctgcgcaggaggtgcttttgagagcttctgtagtccgcacgctcacacagctggatagtatttcatatgtgacatttactgtaaacagtattcctcttgtggactcggatgatgagattgtcggtagcatgggtgctgatgattttgttgagaatccgggtgagcagattaatacaagtgtgaaggagacactcacgctttattttgctgacaaggatggtacagggcttgaaaaacagaccagagtgatacattacagctcaaatatagcgcttgaaaagcttgttgttgagcagcttattgagggaccgaagggctctaagctcaaggcaactcttccgggcacaacaaagcttatcaatgtgtctgtggcagatagaatatgctatctgaactttgactcttcgttcagaaatactattgacaataagctgacagaggatgtggtgctgtattcgatagttaattcactcacctcgcttcctactgtggacaaggtacagatctcgcttgacggtgagaatgacggcatgctgctttataattacaagctaagcgacatgtatgagtttaataaggatatagtggattctaatgattccacggaaaaaactgaaaaatagaatagattggattaggaggagaagagtattagtaaaagaccgatgtttttatttgcgttggtctatactgcaggaactgtttcaggtatgtatggcaggggctttggcttttgggtttttgccatgctggttgtggctttaatagctgagtgtgtggtgtctaagggcagcctttccggtatcgggcgcatagttgttttgcttatcctgatatcgtcagctgtttttgcaacagcacaattcagatacgcttcagtggatgaaaaccgtgacagctatatgcagtatatgacagatgaaaaatctgtcatcgtctgggggaagatttataaaactgaatacaaatatttctcatacaggtattatatgacggactgcgtagtgcagcccgggtacggcaaggcttttggcagaaaaatatcctgtggtgatgttgtggtatactgtgacagcaaaagcgcacatttgggcgattatatgaaagcttgcggcaagataggcttgtttaagtctgcaaccaatgagggagagtttgacagaacgcgcttttaccgctcgcagggaattgatttttctgtgaaggcagacaatattaagacaagcgccggtaaacatgcatggtattaccacagacttgaaaaacttcgtgatacgctgtcagcttcacttcttgaggtgactgatgagacaacggcaggagtgctttcgtccatgctgcttggagacaagtcgtatctggatgatgagataaaggatttataccaggtcagcggtatttcacatatactggctatttctggacttcatatttctatagttggcatggccttttacaagcttctcagaaaaagaagggtgagctatacagcggcatttgtctgttctgcagcacttatactaagctatgctgttatgacaggaaatgccgtgtccacaaggcgtgccgtggggatgttcatacttacaatgcttgcggcagctttaggcagatgcacagatatgctcaattctcttggcatcatggtcatttacctgctgtgggacaatcctatggttttgggatatgccggatttgtgttctcggtaggggcaatacttgctataggtattgtgacgcctgtgatgagtgctactaagggcgggaaattctgggcatcagtatccatacagcttccgatgcttccggttgtggctatgaactattatgagctgcctctttttgcggtgtttgtaaatctcattgtgataccggctttacctgtcgtatttatttcgggtctgcttgcgtctgccgcaggctgctttggcgtgatgcccggcaaaatgctggtgtttcctgcatttgcagtgttaaaactctatgaggtgctttgcagtcttgttatgaagcttccgggggcatcggttatcacaggagctcctgatggatacaggatttttcttttttatgctgttatgagtggctttttggtggcattttcgcttaaaaaacgtgccatagagtgtggcttaaaagaaaaaagccaaatcctttacagtgtccaaagagtggtgtgcacagcagttttgcttgcgattttgcttgtgaagccaaaaactgctgcgcagcttgatatacttgatgtggggcagggagatggcatattttaccgctttgagtcaggcacatgcatctttattgatggaggaagctctgaccgaaaacagcttggcgagaatgtgattatgccgtttcttaagtataacggcatacagagtatatcatactggtttgtttcacatgcagacagtgatcatataagcggattgtctgaggtgatagacagtgggtatactatagagcatatagttgtggcagaagcagcggctaatgaggaagctatggaggagctgctttttaaagctaaggaagcagaaattgatatatgccttatgtcaaagggggattcgattgaaataaatgatgcatcaggttcacacagtactgcaaatgaagaagctgatggcatcatgtgcctgtatccggggccttcggatactgccttagacagaaacgatatgtgtcttgtgctgaagctcacggatggcaggtttagtggtattttcggcggagatatatcatctgaggtagaaaagaagcttgttaatgagtatggggatgggctttctgtggatttttacaaggcaaatcatcatggttccaggtattcaagctctgcagactggattgaggctttaagcccaaggtgggctgcagtatcatgcgcggcagaaaaccgctatggacatccggctgatgaagccatggataggcttatggatgcaaagtgcagtattttatacacaatgcaaagtggtcagattaagtataaagagagtactatatatgaaaacaatagacaatgatataaaagcaggagatttcaaaaaggtttatctgctgtatggacaggagagatacctcataaaacagtacagggacaagctgataaaggctatggtaaatgagggcgacagcatgaacttttcatcgtttgagggcgatggaatcaaccagaaggagataattgacctggcggagacacttccgttttttgcggataaaagagtgattcttatagaggatgcaggcattttttcaaaggcaggcgatgagctaggagagtatttaaagggttcacctgagagcacgcactttatatttgttgaggagagcgttgataagcgttcaaagctttataaggcggcagccaaatgcggtaatcctgtggagttcaaggaacagacggatgagacacttgccagatggataggaatgaggattagaaaagatggaaagggcatgagccaggctgcctacaacagctttatagaaaaaaccggcacagatatggaaaatatcgacaaggagcttgagaagttgctgtgctactgtatggacaaggacgtgattgagctttcggatgttgagactgtaacgacagagcagatcacaaacaaggtgtttgagatggttgatgcgattgcatcacacaaacaaaagcgtgcgcttgagctgtattacgatctgctggcacttaaagagccggccatgcgtattatgtatcttatatcgcgccagttcaatatactgatgaatgtgaaagccatgacaaataagggctttggcaacaaggatatagcatcaaaggccggatgtccggagtgggcggtgcgcaaatatcaggcgcagtgcagggcatattcgctggatgatttaaagagggctgtgagagacggtgtggcatatgaggaggatgtgaagaccggcaggatgaatgaccagatggctgtggagctttttatagtgcagtactctgcagatatgaccggcactcatacgacaggcagtaaatgatataacgcaaatatacaaaaaaacaaataaaaaaacccatcggtatgacggcaccgatgggtttattatttattgctatatagtaattaagctaatccgttaacaagctttgttaaacgagatacttttctggctgcgttgttcttgtggaagataccctttgaaccagcgcttgcgataacagaagttgcatcctttaatgcagcctcagcagcagccttatcatttgcagctacagcagcctcaaccttcttgattgctgtcttaactcctgatttgattgctttatttcttgcagccttagtttctgttactaaaattctcttttttgctgatttaatgttagccaactcgtacacctccaaatatttaatctaatgtatgccaaaacagacacggacgctttggcacaaacatactagaatataatatgtcaacctttctgctctgtcaatacatattttgaaaaaaattgcaaaaaattaacatatatgtgattttggaatatcatacaggggaggtgtattgatttgtcggctgataaatggtgtgcaagaactgatctggcgcttgagacgcaggagagccttaaaaaggcaaacacagatatgagaggtgtgaatttctctgaaaaaaagctggataatggaatcatagtcagtgtagtgacaattgactcagaaaatgcagtcagggctacaggccgtcctaaaggaaaatatgtgacaattgaggctgctatgctgtccgagggagatgaggagtgctgtcaggctgtgacgagggagctttcaagagagcttaagagctttgtaaaggctgtctgtgacaagcgtatatatgcggcacttgttgtcgggcttggaaacagaaatgtaactcctgatgcgcttggaccaagatgcgttgacagcttgtttatcacccgccatatagtaaaggaatatggcaggtatgcgtttagcaacgagaatgtaaacagtgtgtgcggcctggtgccgggcgtgatggctcagacaggcatggagtgccttgagataataaagggtgtggtgagcgaggtgaagcctgattttgttgtgacaattgatgcgcttgcggcacgcagtacaaagaggctgggctgtaccatacagctgacggatacaggcatagtgccaggaagcggggtaggaaaccacagggacggtatcaaccatggcaatctcggagtgcctgttatcgcaattggtattccgacagtcattgatgcggtgactattgtttcagatgcggtaaatgccagccgggagaacaccgcaaagctcatgtcgcctaagttaaacggcatgtttgtgacgccaaaggatattgacgagacggttaagagactggcagggcttttgtctgagggtataaatatggctttttcaaacgatgaatatgatgactatagtgaataatgttattgcttcgaatatcattagagccagccgcataagctttatgtagcaggggctgcctgatgctttagatgggagatgatattgtgaagaaaaaaatgattgtgcttatagcatttatatatattgcgtctatgctgttttgcggtgatggtgtgggaaagaagttcgtggaagaaaaatttccgcaccttacatattctgacaaggagtgtgatgattcaaaaaagaaggagctgcgtattgtggaggatgaggatacagcaggaggtattctctcatacgaggagcttgctgcgatggaaaatgaaaatgcaagtgtcaggaacaatatgctgccggataccgaccagctggcatttgttgatgaagctgaaaaaaacggtgagctggcagagcttgaggagcagcagaacgtgaaaatgccgcaggtagatatgagctttgataatctggtaaaaaactattatcaggtggacaagactacatatataggagccgatgagctatgtgaggaggctttacttggacgcgatatgtctatagaaaagtcaggcaacggtcctgatatactcatataccatacacattcgcaggaggggtacagtgattcccttgatacatcagagacagagaccgtagttggagtgggtgataggcttgaatcacttttgagggaaaaatatggctacaatgtgctgcatcacaaggggcagtatgatgtgaatgaccgcgaccatgcgtattctaattcacttcctgagattacagagattattgagaaaaatccgtctataaaggtggttattgacttgcacagggatggagtggctgagactacaaggcttgctgccacaatagatggaaagcctatggcacagattatgttttttaacgggctgtgccgtactgctgcaagggggccgattaatagtctgcccaatgagtatttggctgacaatctggcgttttcatttcagctgcagctcatggcaaatgagtattatccagggcttgcaaggcgcatatacttaaagggctacagatataatatgcatctgtgtccgaaatcgctgctcgtggaggtgggagcgcagacaaataccaaggaggaagcgtacaatgcaatggaaccacttgcagatatacttgataaagtgttaaaataatatagactttatttcacaaatctgataaactttgatgagttattgaaagcattaggaggacatatgtcaatagatcagagcaaaatccgcaatttttgtattattgcccatattgatcacggtaaatctacactcgcggacagaattatagaaaaaacaggcacacttaccagcagggagatgcaggctcaggtgctcgacaatatggatttagagagagagcgtggtatcacaattaagtctcaggcagtccgtattatatataccgcaaaggatggcgaagagtatatttttaatctgatagatacaccgggacacgtggattttaactatgaggtatcaaggagtcttgcggcatgtgacggagctatacttgtagtggatgcggcccagggcgttgaggcacagacacttgcaaatgtttatcttgcactggatcatgacctggatgtatttcctgttataaataaggtggatctgccgagtgcgcgcccggatgaggtggcacaggagattgaggacgttatcggtattgaagctatggatgcaccgcgtatttccgcaaagacaggactcaatatagaggatgtgctggagcagattgtaaaaaagattccggcaccaacaggcgataaagatgcaccgcttaaggcgcttatatttgatgcaacatatgattcttataagggagtcattattttctgccgactgagagaaggctctgtaaaggtaggagacacaataaagatgatggctacaggtgcatctgatgtggttacagaggtgggttattttggcgcaggccagtttataccatgcgatgagctttcggccggtatggttggatacattgcggccagcatcaaaaatgtcagggatacacgcgtgggtgatacagttacactcgttgacagaccgtgcgatgaggcgcttccgggctataagaaggtcaaccctatggtttactgtggtctttatcctgcggacagtgcaaagtatcctgatttaagggatgcgcttgaaaagctgcaggtcaacgacgcttcattacagtttgaacctgagacatcactggcacttggctttggcttcagatgcggattccttggtcttttacatctggaaattattcaggagagactggagagagagtttgatctggatctcgttaccactgcacctagtgttatttacaagattcacaagacaagcggtgaggtgatagatttgaccaatccttcaaatatgccggatccgtcagagattgagtatatggaggagccatacgtatctgcagagattatggtcacaagtgactatgtcggtgcgattatgaagctgtgccaggagagacgaggagtctatatcagcatggagtatatcgaaaaaacacgagctctcataaagtacgacttgccattaaatgagattatctatgatttctttgatgctttaaagtcacgctcgaggggatatgcttcgtttgactatgagatgaaggattatgagcgctcagagcttgtcaagcttgacatcttaatcaataaggaaatggtcgatgcactttcatttatcgtattcaaggagagtgcatacgaaagaggccgtaagatgtgcgagaagcttaagggtgagataccaaggcatttgtttgagatacctattcaggcagcagtcggtggcaagattatagcaagagagacggttaaggcgcttcgcaaggatgtgcttgccaagtgctacggtggtgatatttcacgtaagaagaagctgcttgagaagcagaaggaaggaaagaagaggatgcgtcaggtgggcaatgtagagataccacaggaggcattcatgagtgtgcttaagctggatgaggagtaatcgcacatatgaagaatcttgagatttatattcatataccattttgtgtgagaaaatgtgaatattgtgattttttatcatttcctgcagatgatgatgcaaagcttcgctatgtcaaggggattatggcggaaatgattttttacggcccgcttatgaagaactatcaggtgtcatctgtctatatcggaggaggtacaccaagctatatagatgagcagtggattgctgctttgatggagggcgtgtttgactgctttaatgtgctgcctgatgctgagatatccatagagtgcaatcccggtacgcttagcagggaaaagcttttagcatacagggatgcgggaatcaaccgcctgtccataggactgcagtcggcaaataatgatgagcttaagctgctcgggcgtatacatacctttgaacagtttgtgacgaattacgaagtggccagaaacgtgggctttaaaaatatcaatgtagatttgatgtatggtctgccgggacagtcagcgtcacagtatatggcgacagtaaacaagattataaggcttcatccggatcatatatcggcgtattctcttatagtggaaaagggtactcctttctatgaaaagtacaagtttgacatggtgcgccaggaggcgggcatgagaacggagtttctgcctaatgaggacgagttatatgatatggaaaaggcgggacagaaggcgtttatggatgccggctacaggcagtatgagacatctaactatgctaaaagaggtatggagtgccgccataatataggttactggaccagagctgactatttaggacttggaataggggcggcatcgcttatatcaaatgtcagatataccaatacatccgatatggatgaatatctgtcgcgctgccgtcatatacatgatgtgggtgatgatatatttaaggccaatctgcatgtggcagctgatgttatagacaaaaagggacagatggaggagtttatgtttcttggacttcgtatgaatgagggggtcacaagagaagcctttgagagggcatttggtatttcgatagatgcaatctacaaggatacgatagacagcctgaaaaaacaggagctgctcgtggtaaaggccgggcatatctatttatcggagagaggaaaggatgtagccaattacgttatggcacagtttttgaaggattaacggagagcaaattatggatatgacttttaagcttcaggtgtttgagggaccgcttgatctgcttttatacctgatagagaaaaataaagtaaatatttatgatatcccgattgtcgagattacagcgcagtacatggagtatgtgaatcagatgaaaaaggataacctggacacgctcagcgagtttctcgtgatggcagctacgctcctcgacataaagtcaaagatgcttctcccaaagaaagaggaagaagagcaggagcaggaagatccaagagcagagcttgtgcagcagctgcttgagtacaagatgtacaagtgcatggcaaacgagcttaaggatcgccagctggatgccggcaaggtgtggtataagaagaaggacatacctgatgaggtccttgcatatgaggagcctgttaatcttgaggagcttgtcggagatatccgtctttctgatttaaacagaatctttcaaagtataatgaagagacaggaagaaaagatagataaggtccgttcgaagtttggaaagattgaaaaggaagaggtctccttagaggaaaagatggactttctgacagactatgctgcctcacacaagcacttcagcttcagagggatgcttaccgcatcgtcaagcaaagtggaagtcatagttacatttcttgccatactggagcttatgaagacaggcaaattaactatcgttcaggagcatatttttgatgatatcaggattgagtcaaggattgctgcataaagagggtttgaggatatatgaattataaagctgcaatagaggctattttatttaccatgggagaatccgtggagcttggaaggatagccgatgcaatacaattaaatgaaaaagaaacaaaaaagctgcttgacgagctgattaaggagtatagaagctcttcaaatataggtatgaatatcatagagcttgatggtgcttatcagatgtgtacaaagccacagatgtatgaatatctcatccgcattgcaaagcagcctaagaagagggtgcttacggatgtgcttttagagactctttcaatcatagcgtacaagcagcctgtaacaaaggcagaaatagaaaaaatcagaggtgtgtcaagtgaacatgccgtaagcaagcttgtcgagtacaatctggtgcaggagcttggaaggcttgatgctccgggaaggccgcttttgtttggtaccacagaggaatttctaaggagctttggggtttcgtctatcgacgagctgccggtactaagccccgtgcaggttgaggagtttaagcaggaggcagaggaagagatgcacgtgaagcttgatgtgtagtgcaggtgtattgtgtaagctgccatttcatataataaggacatgcaaataatcatatatattaccgatggaggtaattgtatgattatttttttaagaaaatataagtcgaaaatagctttaatggttttcgtttgtgtgttggtttgtactgtcagctgtttgcttgattttaagacgctggaaaagcaaaaaatgcccggtttggaaaagaaaagtgtgtttatggcagctgaaaatactgttgctaagaatactgacaaagccgtaaatgagcccaggcttcatgctgtttcagcagcattatatgatgcggatgacgagacgtttatatatggtaaaaacatgagagacagcatggcaaatgccagcaccacgaagcttcttacgtgcattgtggcacttgaaaaagctgatataaatgatactgttacgatttcacaaaatgctgcatcacagcctgaggtcaagcttggacttgtggcagggaatagctataatatgaaggatttactctatggcatgatgcttgagtcgttcaatgactgtgcctatgcgattgcggagcatgtgggcggctcgacggagggttttgcaaagcttatgaatgaaaaagcaaatgagatagggtgcctcggcacgtattttattacaccaaacgggctggatgctgagaatgatataagctttcaccactccacagcgggagatttgtgtgttataatgtcttattgtgcgtggaaatcacaaaaatcaacacagtttcttgagataacacagactatgcagtacacgtttgagacagagaaaggtcagatggtttttaacaatcacaacaggctccttacggagacggactactgcatatcgggaaagaccggctttaccacaaaggcaggctactgctatgtcgcagcagttgaaaaggatggaaggagaatgtgcctttctctcttgggctgtgggtggccaaacaataaaaactataagtgggctgatgcaaagagtctggtggagtatgcggtttcagatgctgccgaagattcttactgtgatgctgcttgtgtaacaacacaacagaccggtgatacacagacaacggataagcaggcggctgacagagacataacggataaacaggaagcaggaaaagaaactccggcggtaaaaaaagaggatagaaacacaattaacttaaaatatatagaaaattacaagaagaataagataatttgcaagaattttctcaagaattttacaattaatataggaaattttttctaaacaaaaattaaggttaaaaatttaacaaattagttgaaaaaaatttagaaatagtctattatcatactagcgaaaaattttatttttttatagatggaggatataaaatgagtagtaacaatcaaagcttggcaatgcagcgtattgctaagttagtcgacgagaacagtttcatggaaattggttctcttgtgacagctcgcagtacagattttaaccttactgcagcaaaagctccttcagatggtgttattatcggacacggtctgattgatggaaatcttgtatttatctacagccaggatgcaacagttcttaacggaacaatcggcgagatgcatgcaaagaaaattgcttctgtatatgatatggccatgaaaatgggcgcacctgttatcggatttatcgattgcggtggtatcagacttcaggagtcagttgatgcattagacggatttggtcttatctacgccaaggaagttgcagcaagtggcgttattccacagatttgtggtgtattcggtaattgtggtggcggactttctgtagtaccggctctttgtgatttcgcttatatcgaagagtctaagggcagaatgtttgttaatactcctgatgcaatagagggtaaccgcgttgagaaatgcgatacagcagcagcttcattccagagtgagaacaacggatgtgtagacggaatcggttcagaggatgatattatcgctgatatcagagctcttgtcagcatgcttccactcaacaacgagggagatgtatatacagactcatgtgaggatgatctcaacagagcatgtaacagcatggctgatatgaaggctgatccaagattcctcttatcagagctttctgatgatcatgtattctttgagacaaagaaagactttgccaagaatatggttacaggttttgttaaattaaacggcatgacagtcggtgcagttgcaaactgcagcacagtatatgatgctgagggcaagaaggcagaggagtttgcactttctcttactgcaaagggctgtaacaaggcagctgagtttgtatcattctgtgatgctttctcaattcctgtacttacacttacaaatgtaaacggattcaagaactgcatgtgctctgagaagaagcttgcaaaggctcttgccagaatgacatacgcattctcaagtgcaacatgtccaaaggttaacctgattacaggcgaggcttacggaagcgcatatgttgcaatgaactctaagtcaatcggagctgatatggtttatgcataccctgatgcaaagattggtatgatggattcaaagattgcagctgagattatgtatccgggcgctgatgcaaaggaaatcgatgagaaggcagctgattatgagaagcttcagtcttctgtttcatcagcagcagccagaggatatgtagatctcatcattgatccggctgacacaagaaaatatcttgtaggtgcttttgagatgctttacaccaaatatgtagatgcaccagagaagaaacacggaactaaataatagaaaggcgcattttgttatgaagaaaaaaataacatatatccttagccttcttatgattgtatgtatgcttggagcatgtggctctgacaatgccgaaaagacatacggcggatacacaacagacgagcttcatactgaggcaacagacagccttggcaatatccagaactacattgcgctcgtagataattgtggcggttatgacaactatgagaagagtgtcaaggaagttgaggagaagacaggcatgacagagggtgaggttgtttacaacacactcggacagtcgggagcaagcgtttcaatgaaaaatatcgacgctgagcttgatgctgtttcatcatggcttgatctggttgacaaatacggagacgtaaaggatgcaactaatggcaaggattttacagtaaccaagtcaggtggtacactcactaccgatatgacacttacatttggcaagcaggatgtaacatacgaattagtatatgattcggttaccatggaggtaacaggtatctcacttactcctgttcagacaatggggcagaagcttgctaaggcaggacagaacacagtaatttcaatgagtattgtattctgtgtacttattcttatctctcttatcatttactgcttcaagtttattgctcttatcggcaataagccaaagaaggcagaagcaaagagcgagcctgaaaagaaagagactgctgcagctgcacctgctgcagaccttacagatgatacagagcttgtagctgttatctcagcagctatagcagcaagcgagggtactacaacagagggctttgtagtccgttcaatcaatagaagataatttaggaggacatttgagatgaaaaactatacaattaccgttaacggaaatgtttacgatgttacagtagaagagacaggaagcacacctagcacagcaagcacacctagaagagctgcagcacctgctgccgctgcaccaaaggctgctgcacctgcaggagcaggaagcatcaaggttgaggccggagctgccggaaaggtatttaagctcgaggctaaggttggcgatgcagtaaagaagggtgatacacttcttattcttgagatcatgaagatggagacacctgttgttgcaccacaggatggaacagtagcaagcattgatgttgctgttggtgattcagtagagtcaggtgcattacttgcaacattaaactaattccaggaggtaaactaatttgagttacgtaggtgaaacactttcaaacctcctacatcagactgccttttttaatctgtcagtcggaaactatgttatgattgccgtagcatgtgtattcctgtttttggctattaaaaaaggatttgagcctttacttttagtacctattgcttttggtatgctccttgttaatatctatcctgatattattgtaagcccggagcactcaagcaatggagtaggtggtttactttattatttctatacacttgatgagtggtcaattcttccttcactgattttcctcggtgtcggagctatgacagactttggtccgcttatcgcaaaccctatcagcttcttactcggagctgcagcacagtttggtattttcggagcttatttccttgcaatccttctcggatttaatgacaaggcagcagcagccgtatctatcatcggtggagctgacggacctacatctattttccttgccggaaaattaggtcagacaggtctgatgggacctatcgccgtggcagcgtactcgtacatggcattagtacctatcatccagccgccaattatgaaattatttactacaaagaaagagcgtgcaatcaagatgcagaaccttcgtcctgtaagcaagcttgagagaattctcttccctgtagtagttactatcgttgtttgtacactgcttccaactacagcaccactcgttggtatgctcatgcttggaaaccttttccgtgagtctggtgtagtacgtcagcttcaggagacagcaagcaacgcccttatgtacattgtagttatcttactcggtacatcagtaggtgcttctacaagcgcagagtcattccttaatatgagcacaatcaagatcgttatccttggtcttattgcattcatggtgggaactgctgccggagtactttttggaaagcttttatgcttctttacaaaaggcaagatcaatccacttatcggttcagccggtgtatccgctgttcctatggctgcccgtgtatctcagaaggtcggtgcagaagaggatccaacaaacttccttcttatgcatgctatgggacctaacgtagccggtgttattggaactgccgtagcggccggatgcttcatggctatattcggtatttagatttaattaaggaggattaatcatgtcagaagtggtaaagaaaccattaaaaataacagaaactgttcttcgtgatgcacatcagtcactgattgcaaccagaatgacaacagagcagatgcttccaatcgttgacaaaatggacaaggttggatacaacgcagtagagtgctggggtggtgcaacatttgatgcctgccttagattcttaaaggaagatccatgggatcgtctcagaaaattaagagacggcttcaaaaatacaaagctccagatgcttttccgtggacagaatatcttaggatatcgtccatatgcagatgatgttgttgagtatttcgtacagaagtcaatcgcaaacggaatcgatatcatccgtattttcgactgcttaaatgatatcagaaacttacagacagcagttacagcatgtaacaaggaaaagggacatgctcaggtagctctttcatatacacttggagatgcttacacacttgattactggatggatatggcaaagagagttgaggacatgggtgctgactcactttgtatcaaggatatggccggtcttttagtccctgcaaaggctacggagcttgttcaggctttaaaggattctacaagccttcctgtcgagcttcatacacactacacatcaggtgttgcttcaatgacatacatgaaggctgttgaggccggagttgatatcattgatacagctatgtcaccattcgctcttggaacaagccagcctgcaacagaggttatggttgaggcattcaagggcacagagtttgatacaggtcttgatcttaatctcttaagtgagattgctgattacttcagaccaatgagagaggaagccttagcttcaggtctcatgaacccaaaggtactcggagtaaatatcaatactctccgttatcaggttcctggaggaatgctttcaaaccttatctcacagctcaaggagcagggcaaagaggacaagtacgaggaggttctcgcagaggtacctcgtgtgcgtaaagacctcggtgagccaccacttgtaactccttcttcacagatcgttggtacacaggctgtatttaacgtactcatgggcgagagatacaaggttgctactaaggagactaaggatatccttcttggtaagtatggtcagacagttaagcctttcaacccagaggttgttgacaaggttcttggtgatgataagaagaatgccatcacatgtcgtccggcagatcttcttgagcctgagcttgacaagattgaggctgagatgaagcagtggaaacagcaggatgaggatgttctttcttatgctctattcccacaggttgctactgatttcttcaagtacagacaggcacagcagacaggtgttgatgcaaaggccgctgatactgagaataaggcttaccctgtatagtatttaaaaatataattcatgcttttgaatttcaagcaggtccggctttgccgggcctgttttttggtgatgagatatggagaaaagtaagtcccgggcatcgggcaggcacgcacactttcatgtgtgcgaatagcgcagcctcttagatactatagaaattatgcccatgaaacacagaaatgtcctgccatggacggcaggacaaggtgttatgcgccatggatggagcataaaagccggtttcgtcaagcatagaccaacttcaaacataatttcgtatagtatcttagtggcgtagcgtagcgcacgggaaagtgtgcgtgcctgcccggtgcccgggacttacgagtctattctatggcaaaaataaaaaatataaattcgctctttcatatagaggaaaaaagtgataatattttaaggtatgaaaaaattgctgcaggtcacacaaatatgtgaagcacagccataaacgggaaagctcaggagtatatgatgtcaaatactaacgacttacttaacaggataaatgctaaatacagtacgatgagcaaggggcacaagctgcttgctacatacataactgataattatgataaggctgtctttctgacagcggctaagatgggcgagacggtaggaatttctgagtctacggttgtcaggttcgctacatcgctcggatataagggatatcccgattttcagaaggcacttgaggagcttgtaaggaacaagctcaattcggttcagcgaatggaggtcacatatgggcgtatcagccagtcacagattcttgagactgtactgcagtctgatcgtgacaagattaagaccactctggaaaaaattgatgcggatgcatttgacctggcggtagatactattttacagtcaaggaaaatttatattgtcggaatcagaagctgtgcacctcttgcaagctttcttgcattttatatgaatctgatgtttgaggatgtgtgtctgcttacgacaaacagctctagcgagctttttgagcagatggtgcgtattggcaaggaggatgtgattatcggcatcagctttccgcgttactctatgcgtactcttaaggcattagaatttgccaacaacaggagtgcaaaggttatcactatcacagacagtattcattcaccgatgaatctgtattcttcatgcaatctgattgccgacagtgatatggcctctatagttgattcacttgttgctccgctttctgtcatcaatgccctgattgtggctctttgcatgaaaaagcagagtattgtcgcaaagacactgacagagcttgaggatatatggaatgagtatcaggtgtacgagaatgatgagattgattacattgatgactctataaaggtacattacgctaagctgggggattcgcaggatgagtaagaatattattgtggtaggtggcggagccgccggaatgcttgcagcatattttgctgcagaagcagggaataagattacgcttcttgaaaaaaatgaaaaacttgggaagaaaatatatataaccggaaaaggcagatgcaacctgaccaatgcgtgcgatgtcgaggagctttttttaaatgtaaagagtaacagcaagtttttgtacagcgctttttatggctttgacaacagcagagtgattgatttttttgagagtcatggcatgcctgtaaaggtggagcgtggcaatcgtgtatttccggtatctgataagtcgtcggatgtgatttttgctttacagagagctttgaaggaaaagaaagtggaggtattgcttcatacggaggtatcgaagctgtgctatgagaaaatcactgatactagggcagatgaggaagctagtgataaaaagcctgaattaaaaataacaggtgtcatattaaaggatggcaccacaatggctgctgatgcagttattgtggccacaggaggactttcatatccttctacaggctctacaggtgacggctacaaaatggcagaggatgcaggccatactgtgacagagtgcacaccgtcgcttgtgccgtttaatgtaaaggaagagtgggtaaagagtcttcagggactttcccttaaaaatacggctatttccatatatagcggcaaaaagaagctttatgaggattttggagagatgctctttacgcattttggggtcagcggccctatgattttgtctgcgagtgcatcaattaagcaaagccttattaagcagcctcttgacatgtatattgatttgaagccggctctcacacaggaggccttggacaagaggattctcagggagtttgaggaggcaaaaaacaagcagtttaagaattcgataaacaagcttttgccggcaaaaatgattccggtgataattgagctttcaggcattgacccggataagaaggtcaatgagatatcgaaagaggaaagaaacagacttcttatgctttttaagaagctgcctgtcactcttaatggaccaagaggatataatgaagctattatcacaaagggcggcataaaggtgaaggaaatcaatccatccactatggagtcgaagcttgtgaatggcctctactttgccggcgaggtgctggatttggatgcatatacgggaggtttcaatctgcagatagcatggtccaccggatatctggcaggaacaagtgcagcggtttgatgattttgaaaactattttgagacatttataataacagttatatatgcgcatagtgaattgaacagctgggattttaataaaaatgatgaacaattatattttaaggagaaattatgagatacaatatagcaattgacggaccggcaggagccggaaaaagcactatagcaaagagacttgcaaaggaacttggcgcaatttatgtcgatacaggtgccatgtaccgtgccatggcatactattttatccaaaagggtgtggacaaggaggatattgacaccatcacgaagctgtgtaaggatgttgaggtttcaatcagctatgaaaacggtgaacagcaggttatcttaaatggtgagaatatcacaggctttataagacaggaggctgtcggcaatatggcatcagcaacaagtgtttatcctgtagttagagaaaagcttgttgagcttcaaagacagctcgctgccagagagaatgtggtgatggatggaagagatataggaactgttgtacttcctgatgccaatgtcaagatatttttaacagcaagctctaaagtacgtgcaaagagacgcttcgatgagcttactgcaaagggtgagaaatgcgatattgatgcaatcgagaaggatattatagagagagaccacagggatatgacaagagagacatcacctttgaagcaggcggatgatgccgtgctgcttgattcgtctgatatgacaatcgatgaggtggtagatagaatgaaacagcttgtgaaagaggcatagcgtatgggagagcttactatcgcaaagagcgccggcttttgttttggagtgacgagagcagtaaatatggtctatgaggcaattgaaaaggaaaatgtgcctatatacacctatggcccgattattcacaatgatgaggtcgtaaaggatatggaaaaaaatggcgtaaccgtcataaacgatctcgatgagctttcttctcatgaaaagggtgtgatgattatccgttcacacggtataagcaaggctgagtatgacaggataaaaaactgtggctttgaggtgcttaatgcaacatgtccttttgtatcaaaaattcacagatatgtggaggattacagctcaaagggctatgatattataattgtcggcagtccaaagcaccctgaggtgtgtggaataaagggctgggcagacgaaaaatgccatgtaaccatcataaattcgcctgaggatgccgaaaattacatgaaaaatagtacaaaaaaactatgcatagtgtcacaaacgacatttaactacaataaatttcaagatatagttgaaattattgcaaaaaaaggttatgatataactgttttaaatacaatctgtaatgctacagaggtcagacagaccgaagcaagaaaggtagcacagtgctcagatgtcatgattgtcataggcgacaggcacagctccaatacacagaagctatttgaaatatgtaaaaacgaatgcaaaaatacttactatatacagacaagtgacgaaatggattatacacaaatcaggtccaacaataacgtaggtattacagcaggggcttcaaccccaaataatatcattgaggaggtttcaaagaatgtcagaaatgagctttgaacaaatgctggaagaatcttttaaaactataagaaatggagaagtggtagaaggtaccgttattgatgttaaacctgacgagattttcttaaatattggatacaaatcagacggaattattactagaaacgagtacacaaatgagccgaacgtagatcttactactgttgtaaaggttggcgacaagatggaagccaaggtagttaagcttaacgatggcgagggccaggttatcctttcttacaagcgccttcaggcagagaagggcagcaagcgtcttgaggaggcttttgagaatcaggaagtattaaaggcaaaagttacacaggtattagccggtggtgtatgtgtcagtgttgatgagacaagagtattcatccctgcaagccttgtatcagatacttatgagaaggatctcaacaagttcaaggatcaggagattgagtttatcatcacagagttcgatccaagaaagagacgtattatcggaaatagaaaggtattactcgttgagcagaaggctaaacagcaggaagagcttcttgcaaatcttcacgttggcgatgtaatcgaaggaacagttaagaatgttacagatttcggtgcattcatcgatcttggcggagtagacggattacttcatatctcagagatgtcttggggcagagtagagaaccctaagaaggtattcactgttggacagactgtaagagtatttgttaagaacatcaatggttctaagattgctctttcaatgaagtttgatgacgagaatccatggaatggtgcaacagagaaatttgctcctggcaatatcgtaaagggcaaagtagccagaatgacagattttggtgcattcatcgagcttgctcctggtgttgacgcacttcttcatgtttcacagatttcaaaggatcatgttgagaagccatcagatgttctcaagattggtcaggaggttgaggctaaggttgttgagttcaatgaggacgataagaaaatcagcttaagcatgaaggctctccttgattcagaggatgatggagcagatgttgcagatgtaaatatcgatgaggttgcttctgataacgagtagtttttgattttaaagctgtcatatataattatatggcagcttttatttgtatcgggtggcacctattggaggattgtgatgtttgatcattatgaatggtttaaaaatgaagtgtacaggctgacgcagatagatctcaattattataaagaaaagcagatgcgcaggcgtattgatactcttgcgaaaaaaaacggggctgattcttatgagacatacattgatatgatttctgcagataaggctaagtttaaacagtttatcaattttatcactatcaatgtatctgagttctataggaatcctgatcagtggagttttttggacagagaggtcattcctgagatattaaagaacaatacagggacgattaagatatggagcgcggcatgctcaacaggggacgagccgtattcgcttgccatggctttttcgaagcatgttccattgtctcgtataaagatactggctacagatattgacgaccaggtgattgcgagtgctaaagccgggctttacagcgcaaagtctgtagaaaatgtgccggctgacctgaagaagaagtactttacccaggtggaggggtcatacaagatatctgatgatatcaagcgatgtgtgacctttaaggagcacaatctgttgaaggattcatatccaaaggattacgatcttatcctgtgcaggaatgtggtgatttattttaccgatgatgcgaaggatatgatatacaaaaatttcttcaatactttaaaatccaagggaatactgtttataggcagtactgagcagataactacatatcgtgagctcggctttgagagattaagcagtttctatttcaggaagccatgatattttatcagaggttaaacagatgggctgttatgtgttttacatatgacagtaccatctgttttgaatttataaaatcttcagtcagcaggaaatagctgtacttatcctttatgtcgaatcgaaactctggcttcatgaagtcagagtactgtctgatgaaggtaccggttttgcgcacatagcagttgtacgccttgcatttttcgcggtattcgtggtcgacatatgctgcgacgctcttgtgtatggccatgtcctcctttggcagatagtaatagtttttgtaatcgctgtagaaatggcgcatttccccctcgaatatctctgcacgcacatagctttttgtagtgccgatggtcagatagatgtcattgtcatggaagcttacagattttggaacggaaaatttattttcaaatgatatgataagctcattcatcagactgccgtcgtaagctgtatatgggtttacggatacaccggtgatatctgcaatgccatgtatgcattctttatacgaaagtatactaaggagctttgtcatgccaaggacatcctcgtagttgtgtgtcaaaagcagggatagcttttcgtagtccttttgggcaagatattcataataaacgtttatgagctcaccaccggaatatttatcctccctatctatacccagaaatgcttcgatgcttttttgcttgtagttttcgaggcgcaaaagaggctttatcggggaaagctccttaaagatatcgagtatctgcacattacaaaaggggtcatcctgcttatatttcttgtatttattctttaaaaatggtatatcaaaaccgacaccattgaaggatatgatagtgctgcaacctgacaaacttcctgcgaaggcttcaattacagctgcttcgtcatcgacagattcggcaaaatactggtctattacaatacggtttttaatgcgccttgcacagcctatcatgtagacaatcgctttcaccggtgaaaagcctgttgtctcaatatcaaagaacatagtgttttctttaaatatgctgtctgaaaaattatcggtttttatgtaaatttcttcattgtgaaatgttttcatttttcgattcctgccttgaatatcatttgtataaacattataacataaagtattaaaaaaagtacataatatactatttaactaaaaatcataagtggtataataggaatagtaatgtgcaatagcatttccacgttattaatctaaaagaaagaggggcacaaaaatgggtcataaaacgtttattggcggtgttcatccatatgatggcaaagagctgtctaaggattcaccaattaaagaagttttgcccaagggcgacatggtatatccggtttcgcagcatatcggcgcaccggctaagcctgttgttgccgtaggtgacactgtgttgaagggacagatgatagcagaggccggtggctttgtttcatcacctatctattcatcagtgtcaggaaaagttaaggctattgagaagcgacgtgtggcggtcggcgatatggttgacagtattgttatcgaaaatgatggcatgtttactgagacaacatatgagagcgtcgaggatgtcactgcgctttcaaaggaagaaatcatcgagaaggtcaagaatgcgggagttgtcggcatgggcggtgccggtttccctacacatgtaaagctttctccaaaggagccggacaagattgagtatattatcgcaaactgcgcagagtgtgagccttacctcacatctgactacagacgtatgcttgagaatcctgaggaattaattggcggcatgaagatcatacttcagctttttgacaatgcaaagggtattcttggtatagaggataataagcctgactgtatcgaaaagctcacagagctcacaaaggatgagccacgtattgaggtttgtccgcttatgacaaagtacccacagggtggtgagagacagctcatctatgctacaaccggcagagccatcaattctaagatgctccctgctgatgcaggctgtatcgttgataatgtagagacaattattgctgtctacaatgctgtaaagaatggacagccagtccttaagcgtatttcaacagttacaggagatgctgtgaagaatccttccaatattttatacagcatcggtacctcatatcaggagctggttgatgctgcaggtggctttaagagccagccggagaagattatatcaggcggtcctatgatgggctttgccatgtttagtcttgatatccctactacaaagacctcttcatcaatactgtgcttcacacatgatgaggtggcagcatttgagccacaggcctgcattaactgcggtcgttgcgtggaggcatgtcctgagcagctcattccaagccgtcttgcgaagtttggtttgcatggacagatggatgagtttgagaagtggcacggacttgagtgtattgagtgtggaagctgttcatttgcatgtccgtcaaggagacaggtggctcagcctattaagacaatgaagaagcttgttctcgctgaaaagagaaaacaggccagcaaaaaataaagaaagaggtggattaaagtgagtgatttatatcatgtttcatcatcaccacatgtacgtgccaaggattccactgacagaataatgctttatgtcattatagcattactcccggcaagtctttttggtatttacaattttggatttagagcactttttatcattctgcttaccatcgcatcgtgtgtggcatcagaatgggtgtttgactacatagttaagaaaaagagcacaattacagaccttagtgcggttgttacaggactgcttttagcactaaaccttccggttgcacttccatggtgggaggctgtactcggtggagtatttgcaatcattattgtcaagtgtatgttcggaggactcggacagaactttatgaacccggcacttggtggaagatgcttccttctcatcgcatttgcggctgatatgactaatttcaatgtcacaagaaacggtgtggatgtgtactcaggagcaacaccacttgcgctcatcaaaaatgaggggctttcaagtgtcaatgtaagggatatgcttataggaaatactgcaggaactattggtgagacatcagttatagctattttaataggtgctatcatcatgattttacttggagtcattgatttaaagattcctgcatcctacattattacatttgctgttttcatgttccttttcggagcacagcagtttgatatcaactatgttgttgcagagctctgcggtggcggactgatgctcggtgcatttttcatggcgaccgattatgtcacaagcccgattacgccgatgggaaagataatattcggtatctgctgtggtatattgacaggagtattccgttgcttcggtgccaatgcagagggtgtttcctttgctatcatcttaagcaactgccttgttcctattattgaaaaggtttctatcccaagagcctttggtatggtaaaggaggcaaagaagaatgaataaacgtattgtacatgacgctttgattttaactgcctttactctggtgcttggttttattcttgccctggttcagggaatcacggcagagcctatcgacaaggccaataaagcagcagcacagaaagcatatcaggcagtattttcggatgcaaaatcatttgagaaatatgactatgatgctgatgaagctgataagcttgtatctgatgcgggctacaaggatacaatcgatgatattgagactgcccttgattcaaacaaggaggcattaggctatgtcatcacagttacagccaaggatggtagccagggaagtatcacattctctgtaggtatcaagaatgatggtactgtaaacggttactcaatcacaagcatcagtgagactccgggacttggaatgaaggccgaggaggctgatttctacaagcagtttgagaacaagaaagtagacaagttcgacgttgtaaagactacaccttcaaaggatgatgagattgaggccatcacaggctcaaccatcacatcaaaggctatggccaacggctgcaacgcagctattacttacttccagaataaattacagggaggtgccaactaatgaacaaatatgtagagcgtttatataatggtatcattaaggaaaatcctacctttgtacttatgcttggtatgtgtcctacactggctgttacatccagtgcggtaaacggacttggaatgggactttccaccacggtggtacttatatgttcaaaccttttgatttcacttttcagaaaagtgattcctaacggagtgcgtatgccggcgtatatcgtcatagttgcatctcttgttacagtagtacagtttttaatgcaggcttatctgcctagcctttcagcagcacttggtgtatacatcccacttatcgtggttaactgtatcatcctcggacgtgccgagagctatgcttcaaagaatccgcctgtagagtctatctttgatggaatgggaatgggacttggatttaccatgggtcttacaatcataggacttatccgtgaaatcttaggtgcaggaacattcttcaacatcaagattttcggtgactggtttacaccaatcacaatctttatcatggcaccgggagccttcctcgtacttggcttcctcgttgcaggcatgaatatcatccgtaaaaagatggaagcaaagggtacacctcttgctgagccggcaggctgcctttcaggagattgtgcacattgtggagcatcatgtccatcagcaaaagcagcacaggccgctgttgagcctaacactacagaaggaggggataaataatgggtacattaggtcatttactgctcattgcagtagcatatgcaatagttaacaacgtagtacttagccagttccttggtatctgtcctttcctcggcgtatcaaagaacacaaaaactgctgccggaatgggtggtgcggtaattttcgttatcacaatcgccacattcgttacacagcttatttacaattttatactgtatccgcttaatctgtcatatttacagactatcgtgttcattcttgtaattgcagcacttgttcagtttgtagagatgttcttaaagaaacagatgccgcctctttacaaggcacttggtgtgtatctgcctcttatcacaacaaactgtgccgtactcggtgtagcacttaacagtgtaacaaagggctacaatatcttagagagtgtagtttacggctttgccacagcttttggtttctttattgccatcgtgcttatggctggtgtacgtgagaagattgagtataatgatattccaaagcctttccagggaacagccatcgtgcttcttacagcatgtcttatggctatcgcctttatgggattctcaggaatggtttctgtataggattggaggaaaagtgatatgaatgttactgcgattattattgcagctttagttgttggagctgtcggtataattcttggatttttcctcggtatttcaggagaaaaattcaaagtagaggttgacccgagagaggaagcaatacttgaggtgcttccgggcaacaactgtggtggctgtggatatgccggatgctccggacttgctgccgccattgcaaagggagaggcaccggtaggacagtgtcctgtaggtggagatcctgttgcggcaaaggtcagcgagattatgggtgtaaaggttgaggccggagtaaagaaggttgcatttgtaaagtgcgccggcacctgcgacaaagcaaatacagactacgactatacaggagtagaggattgtgttgccatgtcatttgtaccgggcggcggacctaagtcatgtaattatggctgtctcggctatggaagctgtgtgaaggcatgtccttttgattcaatccatgtggttgacggagtggcatgtgtcaatccgcttacatgcaaggcctgcggcaagtgcgtagaggcttgtccaaagcacctcatcgagcttattccatatgacacaaagcacgttgtaaagtgcagctcaaaggacaagggcaaggatgtcatgaaggcatgctcagtgggctgtatcggttgtcatctgtgcgagaagaattgtccgtcagatgctgtccatgtagtagacaatgtagcttatattgatcaggagaaatgtacaggctgcggaatctgcgcagagaagtgtccaaagaagattattctgtaatgaataaaagctgtcacatatcattatgatatgtggcagctttttttataagcttgcagctattctgtgcttacgttatactcatctgatgtcgtgataatgctataatcatctgtcacaaatattgcctcaacaccggaaagggaattgataagctcctttgctttatcaatgccaagagcaaagcatgtggtgcttaaggcatctccgtcgcaggaagagtcacttatgatggtgacagagtacagattgtttttgacaggatagccggttgtggtgtccagtatatggtgatatagcttgccatctactctgtagtatcgctcgtagatacctgaggtgacgacggatttgtccttgactttgacggtacatattggctcgccgctctcgtcgaagggcttttgtatgccgacggtataatcacttccgtcggattttttaccgacagtgaggacgttgccgcccaggtttatgatgcctgaggtgatttttttggactgtaaataagccttcatcttatcggcgataaagccctttgcgattccgccaaggtcaagctttgcttttgaatcggttagcatcacatcgtttccgttaatctgtatattgcggtaatttacatgtgacagctcgctttgtatctgcgcatcagacggaacgactgatgcatccacctcattatctttagagtcggtattttcagctatttcagaaaaattccacaaatcagacagctttcctatagtgatatcaaacctgccgtcacttgtgtcgccgtattcgatgcccttttttatgagctcaagtgtatcatcgcttactgtgacatattctttgccggcagcgtcatttattttgctcacctctgagtaactaactgtgtttgaaagcatatcctcatatttctttgccatatcaaagcagtcgtctatgtatttctcgtcggtagtgccataaagcgtaatctgtattatcgtatcaaagtagaagccctgtttggaaaccttctgctgagccttgggctttaattcacatgcagacaggcttcctgttattgttgcaagcgccaaaaggacagggacaaggtgttttagtttatttttcatagtgcatcctttattaatttcctagttgtaaattatttatagttaaagcttaaatagtaaaagcataaatataactttgcgtccgggctttatgaaatttaaaaccgaaagcaacagaaatataataacacaaaataaaaaaatgagacagtagtaaaaatgattttgtattttgcatgaatatatggtaaagtagtaaatgtatgcgtaatgtaattatgtatgcatttagacttacaataggaaagatgatagaaatgagttttttagacaattataaaagagtggtaataaagataggttcatcgacgctgacacatgcagagacgggaagcctcaatttttcaaagatggagcgtctggtgcgctcgatatgtgattacagaaacagcggtatggatgtgtgcctcgtaagctccggcgccatcgcggttggacgtgatgtgataggcataaaggagcgcccgagcgacatttcaataaagcaggcatgcgccgcagtgggacagggcaggcttatgatgacatatcagaagcttttttccgagtataatcagaattccggacaggtgctcatgacaaagaataccatagtcaatcctgtttccagacgcaatgttatgaatacatttgaggagctttttgatctgaacgtggtgcctattgtcaatgaaaatgatacggtaagcacatacgagatgcagtttggtgacaatgatacgctgtctgctatagttacatcaatcacgaaggctgatctgctcatactactatctgatatagacggactgtattccgacgatcctcatgacaatccggatgcaaagcttatcagagaggttgatacacttgacaggaaaatacttggcatggcaaagtcatcaaccggcagcgatgtcggaaccggtggcatggcgacaaagcttacagcggcaaagattgccacatattccggtgccgatatgattatcgcaaatggcggcaatatggggattttatatgacattatgaatgacagatatacaggaacacttttccacagggcaaaggatgcagagtttgtgcttgcggattatatacaaagagagatggcacctacatctacaggcggccagtaatcagctatcaatttgaaatcaggagagtgctatgacacaggaaaaaatacagcgaatcaatgagctttacagaaaatcacaggcagagggactttctgaggcagagaaaaaggagcaggatcttttgcgcaaggagtatatagcaaacgtgaagaagaatttaagaaaccagctcaacaatatcgatatggtaaatgatgacggttcggttgagaacctcggcgagaaatatggaaacaaaaaaagaaattcgtagcaggcttaaaaagcaaagaggctttctgggtgctgatgagtgcctcggtatgagccatgaaatttataaaaggctcatagctttagagctcgacagggaatatgacaacatacttttgtattcagctatcagaaatgaagtgaatactgatgagtattttacctatttaataaacaaagcaaaaaggatatattatccgagggtttcgggcaatacaatgtccttttacagggtaagaagccttgatgagcttaattgtggttcatttaatattaaagagcctgatatgacgaaggagtatacgcaggcggatggcagggcacttatgatagtgccggggcttgcattttcggataccggctacagaatcggctatggaaagggcttttatgacagatatttatcgtcttttacaaaaagagacactgttatggcaattggagtgggctacgatttccagttacttagcagcatgacgtttgaagatgaatatgacgtacccttagatggggtgataacagataagagagaggtgtttattgatgaatgatttagaaaaaatttgtgcggatgcatatgaggccagggtaaagataggaacactggatacagatatcaagaataaggtattaaacgatgcagcggacaatcttcttaaggcagaaaaagaaatccttgaggcaaacaaaagggatgtggccacagcagaggaaaatatgaaggcaaagagcatgattgacaggctctcgcttgaccatgacaggctccttggcatggctgacggactcagacagatagcaaagcttgcagacccaattggggaagtgatgtctatgtcaaagcgtcctaatggccttattatcggaaaaagaagagttgcaatcggtgttgtgggaatcatttttgaggctcgcccaaatgtcacatcagatgcctttggtctgtgttttaagacaggcaactgtgtcatattgaagggtggaagtgatgcgataaataccaatatcgcaatagtaaaggctttaaaaaaggctttgacggacaatttggtttctgctgctgcacttgcacttattgagtcaacagacagagagacaacaaatgcatttatgaagatggatcagtatgtggatgtgctcataccaagaggtggtgcaggactcatacaaaatgttgtcaaaaatgctacaattcctgtcatccagaccggtacaggcaactgccatgtatatgtggacaaggatgcagactttgatatggctgttaatattattaacaatgcaaagacacaaagaatcagtgtctgcaatgcatgtgagtcgattgtagtacacagtgccatagcggaggagtttctgccaaagctgtacgataagctaagagagcatcatgtacagctgcactgtgatgaaagagcgcaggcaattcttgccggaagagatgatgtgacagaggccactgccgatgactggggtatggagtatcttgattacattatgtctgtaaagattgttgacagcattgatgaggcaatcgagcatatcaacagatacaacacatcacattcagaggcaatcatcacaaatgattatgacaacgcacagaagttcttaaatgagatagatgctgcatgcgtttatgtaaatgcctcaaccagattttctgatggaaatgaattcggctttggagctgagataggaatcagcacacagaagcttcacgcaaggggacctatggggcttgaagcactgactagctacaaatatattatttacggcagtggtcagatcagggaatagtcaggtaaagtatcatagaattaatttgagaggaaatataatataacatgagctacgatatagatataacaaagacaccaccggcacatgagcctgagaggcagtattactacatggcaaaggcaaaggattttgttgaaaagaaatctaaagaaatcggccgtcctatgacttattttgtaaagacattcgggtgtcagatgaatgcccgcgactcagaaaagcttgtcggaatactcgagcagataggctacgtggaaggaactgatgagcactctgatttcattgtatacaacacctgtaccgtacgtgagaatgccaataataaggtgtatggcaggcttggatatctgcagaactacaagaaaaagaatcctctgatgaagattgctctctgcggatgcatgatgcaggagccggaggttgttgaaaatatcaaaaagcactataagtttgtagatatcgtatttggaacccacaatatattcaagtttgcagagattttgtgcaacaatatcgagtctggctcacaggtgattgacatatggaaggataccaatcagattgtcgaagatctgccggtgaagagaaagttctctttcaaatcaggtgtcaatatcatgtttggctgcaacaatttctgcagctactgtatcgtgccatacgtaagaggtcgtgagagaagcagggagcctaaggatatcataagagagatagaaaagcttgttgcagacggagtgtgcgagataatgcttctcggacagaatgtcaactcatacggtaaaactcttgacaatcctataacctttgcagagcttcttcgcgaggtcaataagattgagggacttaagaggattcgttttatgacatctcatccaaaggatttatccgatgacctgattatggcgataaaggagtgcgacaaggtgtgcaagcatatgcatctgccgcttcagtcaggtagctcaagggtgcttaaggagatgaacaggcactatgacaaggaaaaatatctcgacgaggtaaagagacttcgtgagcagattcctgatattgcaatcacaactgatatcattgtgggcttcccgggagagactgaggaggatttcattgagacaatggatgttgttaagcaggtcagatatgacagtgcttttacatttatttactcaaagagaacaggcacacgcgcagctaccatggagaatcaggtgccggatgatgtggtcaaggacaggtttgacaggctcttaaaggaggttcagactatctcatcagaaaaggcaaaatgctatgagggcaaagtggtgccggtacttgcagaggagatggatgaccagaaggatggctatgtgaccggacgtatggacaataattcaatcgtacattttccgggtaccgaggatatgattggaaatatctacaatgtgaagcttgatgagtgcagaggcttttactatatgggagagataaaagaggatgcgtaagcgttttggcagaaatgatataatcctgatatcggttattgtaattatctctgtcgctctgcttcttatatggaagcttgtatatttaaagggacaggatacggatagcgatgcatgtgtcgaggtgactatcgatggaagggcatatggcacatatccgctttcaaaggatgatacaattgagataaaaaacggcgatggcgatgttactaacactcttgtcataaagggcggtgtggcggatatgacctctgccgactgtccggatcatctgtgtgtgaagcagaaggcgatatcaaaggagggagagtcgattatctgtctgccgaataaggttgttgtgacggtaaaaagcgacacgaaatccgatatagattctatatccaagtgatacccgaacatttttatagaaagaatgagataaatgaaaaccagaaagattgcatatcttggtatgcttatggcactggcactggtgctaagctatgttgagtcacttataccgtttgcggtaggcataccgggagtgaagcttggacttacaaatatagtgacagtaatcatgctttatatagcagcacccatggagacgtttctgctatgtgtatttcgcgcggtgctttcgggctttatgtttggaaatgcattcagtataatatattcactggcaggctgtatactaagctttatcgttatgtacctgcttaagaaatcagataaattcagttcggtttcaataagcctggtcggtggagtgtgtcacaatataggacagataatagttgcggctatagttttgtcaacttacagcgtagtgtattatattccggtgcttcttgtggcaggatgcatcacgggacttgtgattggaatagtagcttcacaggtgcttttgaggatttctgacagctttcatgtatagttttaatgggctgtaatctacgtatatttaataataaaaggagatgctgctgttttatgcctgtgtgtcaggatacagacgaaacagtaacaaatggattcaatgtatgcatatataaaaggagagcttgcagaaaaaaatatagacagcattgtagtggaggcagcaggtgtaggctatctcatttacataccgacgcagtattttgatatgctgcctgacgagggagaggatgtaaaaatttacacctacctgtgtgtcagggaggatgccatgatactttacggttttttgagcaaggatgatcttgaaatctttaagatgctgattacagtcagcggaatcggaccaaagggcggccttgccattttgtcaactctgcctgccgatgatttgcgttttgcgattctatcgggcgattcaaaggctatatcaaaggcaccgggaataggtgcaaagacggctcagagagtgatacttgatttaaaggacaagctgtcgcttgaggatgcatttgaaaagaagcttgagaaccaggcatccggtgctgctgtatccatgaacagcactgtgaaaaatgatgctgtcatggcgctcaatgcgcttggatattcatctactgagagtcttaaggcagtgtccaaggttgatatcacagaggatatggatgtagaggatgtgctgaagcttgcgctcaaaaatatgggctgattgaaaaaactgtaagcttaaaacagaaacggggaacaaaacgtgaaaagagtaatttccacacaattgcaggaagaggacataaagatagagaaatccctgcgtcctatgtattttgatgactatatcggtcagcagaagataaaggacaatttaaaaatatatattgaagccgcaaaatcaaggggcgaggcgctcgatcatgtgctgttttacggacctccggggcttggaaagacaacacttgcaggaatcattgcaaatgagatgggtacaaagataaaggtgacctccggtcctgcaataggtaagccgggagagatggcagccatactcaacggactttctgagggagatatactgtttgtcgatgagattcacagattaaaccgtcaggtggaggaggtgctctatcctgctatggaggattacgccattgatatcatgattggaaagggcgagtctgcaaagtcaatcagatttaacctgccaaaattcacacttgtaggtgcaacaacgagggcgggtatgctttcggcacctcttcgcgacaggtttggcgtggtaaatcatatggagttttatactgtcgatgagctaaagcatattatcgtcaattccgcaaaagtgcttggagttgagatagatgacaagggagcctacgagatggcgcgtcgttcaagggggactccaagacttgcaaacagactgctaaagcgtgtcagggattttgcgcaggtcaagtatgacggcaaaatcacctatgatgtggcaagctttgcgctggaccttttggaagtggacaagtacggactggatttgaatgacagaaatatacttctcaccatcattgacaagtttgcgggaggaccggtaggtcttgatacgcttgcagcggcaataggtgaggatgccggaaccattgaggatgtttacgagccgtatctggtgaagaacggcttcataaaccgcacaccaaagggacgtgtggctacagaactagcctttgagcattttgagagaaaaagggcttaaagttgcaatttatatctataaggcatataataattaagtatttgatattgaaattgatattaatatagctgatttgaataaatgtgaaaacggaggatgattaaatgtctgcaaaaacaaatgccgaggtggtaatagacggaaaggtttacacactgtcaggatatgagaatgaggaatacttacagaaggttgcggcatacatcaacaacaagattgcagagtttgatgatatggatgagtataagcatcttccgggcaatatgaagagcacacttatcgagctcaatattgcggatgattatttcaaggcaaaggcacttgtcgaaaagctcgagggtgatatagagaataaggataaggaaatatacgatttaaagcatgatttaatttccaatcaggtgaagaccgagaatgccgaggcgagcatgaaggagcttgaggcacaaaacaaagagcttttactcaacaaggcgagacttgaggcaactcttgaggagtcacttcttgatggaaaaaagcctgttaaaaaatctgcacatgcttctaaaggggcaaatgacagtagcgataaatagcaataaaaggggaacagttatcgtacactgttccctattttattgcaggtttatatgatattaaatgagcatctatatgaggaaatatatgagaaataaagattttgaactgcttgcaccggcaggcaaccttgagatacttaagggtgtgatagaaagcggcgccgatgctgtgtatgtgggcggaagcatgtttggagccagggcatatgccaataatttcacagaagaggagcttttagaggcaattgattttgcgcatttacgaggagtaaaggtgtatctgacggtcaatacgctgattaaaaacagtgagttttcaaagctatacgactacctgcttgtgtactacaaaagagggcttgatgcagtgatagtgcaggatattggagtggtgaaggctatccatgagtattttccgtcaatggagatacatacgagtacacagatgacggtgactggagcagacggagtgcgttttctttcacagtttggagtgacgcgtgtggtcatggcaagggaggtttctcttgccgagatgaagcgcatacatgaggaaaccggcatggagcttgaagcctttgtgcacggagcattgtgctattcgtattccggacagtgccttttcagcagtattttaggtggtagaagcggaaacagaggccgctgtgcacagccgtgcagactgccgtataccgtggagggcaaaaaggatgaatacattttaagccttaaggatatgtgtggtataaaggctcttgacaagctgcatgatgcaggtgtttattcgctcaagattgagggacgtatgaagcagcttgagtatgcatgcggagtggtaaaatactacagaaactatatcgacagtatgaagcctgttaccgatgctgattatgacaggataaaggcacttggaaaccgctgtggtttcacagacaggtattatttcgaccacaatggctctgatatggtgacttatgtgaagcctaatttcgtttcaaatgctgcagagccttcgcctgaaaaaagaaagctctcgatagagggagagcttgttttaagagagggcgagcccggaagcctcactgtaaaaagaggtgatgtgacatacaaagcctcaatagaacctgtcagcgccgcacttaaggcaccgcttgataaaaaagccgctatcgacaggataaacaaaaccggtgatacagactttgagttttcacatattaaagctcaaatcggagaaaacgtctttgtgccaaacggagcactaaacaagctgcggcgtgatgcaatttcagggctttgtgataagctgttgaaaaagtattacaggaatgatgcacgatatgctgatatatcaagtatgtgtgagctccctgaacatgtcgtaaaaagcgatgcagcacatgaagatggagctgtaaatgcaaaggattacaccaccatatgctcgtgtatgacacgcgcgcagcttgatacacttattagctatgactgctttgatgtattttatctggattttgacatgtatgacaggaagactctgatacagcagtttgcagatgatgtgaaaagccttacaaagcgaaataaaaaagtgtatctcatgctgcctacgatattcagggcggattcatcggattattttgtatctatcgcaaaagagcttgatacggtaagcttcgagggctttgttgtgaaaaattacgaggagctttatctgacagaaaatctgtttacagggaaaaaagttattttagaccacaatatgtatacctttaatgatgtttcaaagagtgtattttttgagcacggagtaagtggtgacacagtgccgcttgaacttaattcaagggagattatgcatagaaacaatataggctcgcagatgatagtctatggatattatccgcttatgaccaccgccaattgtgtgcacaaaaacacaaagggctgtgataaaaagcaaaagcttatatatttaaaggacagatacaataaatcctttgcagtttgtaacaactgtaaggagtgctataatacaatatataattcactgcctaccatgctcacaaagaatataggtaagcttaaggaggctggtatcaggagttttagatacagctttacaatcgagactccaaagcggattaaggcggttatggatgataaggtagctgaatatacaaacggacattacaaaagaggagtagaataacatggtacatctgatagtacagctttccaagtatattatgataatactttttctcatatatacttttttatgctttcatttattcaagtatcccgacaagccgaaaaagcagaggcatatatataatctgcagagattttatatgtttctgattcatttagatggttttttggtgctctttgccacgacaatggatacaaagataataggattttatatagcacagcttgtgctttttgaatcaatttatttgatttatcataagttttataagaatgcctcagagcttgtgctaaacaacatggtgatgatgctttgtataagcatgattattttaactagaatttcgtttgacaaggcattaaggcagtttgtttttgtacttgccggaacgatatttgcgtttttaataccgcttatcatgcaaaaaggcacgatgtttcgaaaactgacatggacatatgccggtgtgggaatagttggtcttttgtcagtgcttgtggtaggagtggcgagcaggggagcaaagctctctttgacctttggtcctgtttcaattcagccatctgagtttgtaaagatactttttgtgttttttatagcatccatgctgtataaatcaactgatttaaagcagcttgccttaacaagcggcgtatcggcagtgtttgtgctgatacttgttgcatcaaatgacctcggtggagcgcttttgtatttctttacatatctggtcatgatttatgttgcgacaaaaaggttttatatttttgccggaggtcttgcatttgtggggtttggaatgtacgcaggctatcatctgttttcacatgtgaagaacagaattgttgcatggcttgatcctctttctgttatagacaaggccggctatcaggtgtgtcagtcgctctttgccataggcacaggcggactgtttggctttggactggggcagggactgccgaataagatacctattgtgtcaaaggactttatcatagcggctatatcagaggagatgggcggtatatttgctgtctgcctcattatggtttgtgtcagctgctttcttatgatatttaatctttccatgcagatgaaggatgcattttacaagtatgtggcgcttggacttggcagtgtgtatgcgcttcaggtgcttttaactgtcggcggctcaaccaagtttataccgatgaccggtgtgacgctaccgcttgtgagctacggtggcagctcgcttctatctacgatgattatttttggaatgatacagggcatgtatattatgcaggcagcccctgaaaaaaggagaaatatagatgacaagagacgaaaggaccatgagacaaaaaacagacaaaagcagacagctaaagagccaggggcgcagggaagtcaacagagaaggagaaaaccggcagcaggcggcaaaaacagcacgaagacacagaaatagagagtatgcggttgttacatattttttccttatagtttttgttggattgataggttatttcttatatttccagtttgtaaaaagcgacaaattcatcaacagtccatacaattcgctgcaggatcttttctctaagaatgtagtgaggggcgagatacagactaaggatggacatgtcatagcacggacaaatgtcagctcggatgcatctgagacaagggaataccctgacggcaggatgtttgcgcatgtggcaggctttgccgtaaacggtaaggccgggcttgaaaagcaggaaaatttctcattgcttcgctcacatgagtttttccttgaccagatagtaaatgatataagcggcaagaaaaataccggtgataatgtcataaccacactggattacgaagcacaggcggctgcatacaatgctcttggagattacgaaggggctgtcattgcaattgagccgaaaacaggaaagattgcagttatggtgtcaaagcctgattatgacccaaataccatcgcaagtgactgggagagcgtaaacggtgatggcagcacttctctttacaacagggcaacacagggacagtatgctccgggctcagtgtttaagatttttacagcacttgagtattataacgaaaatccgtctacatacaacgactacagctttgattgtgacggcagtattacaaaggacggctttacaatccactgtgccggcaataaatcacacggacaggaggacttaacaaagtcgtttgcaaagtcatgcaactcgtccttttccaatataggtcttttggtggacaacaataagcttaataccttgtgtgacgacatgcttttcaacaagaatctgcccatagcctttgattcaaaaaagagtaagtttgcgctggataacaatgcttcgtcagctctgaccatgcagaccacgataggtcagggaaacacgcttgtttcaccgcttcacatgtgcatgattgccggtgcaatctgcaatgatggaaatctgatgaggccatatctggtagaccatacggaaaatgcgagcggggcgcttgtggagcagaataaaccggcttcatacaagcagattatgtcaaaggatcaggcagcttttcttcagaatcttatggcagcagtggtatctgatggaacaggcgcaaagctaagagaccagagctatgaggcctttggaaagaccggaactgcccaggtatcagattctacagaccagaccaatgcctggtttgtgggctatggaaaaaaggatggctacaatgatctggcaatcgcagtaattgtggaggattcgggtgccggaagcacatatgcggtgccggtggcaaaaaaggtatttgataaatatttcaatgaataggcttgttgcactttttttagaagtaggttatacttaagtgtaatgacagacgttatcgttcatatttcgcttgaactgacagatagcgtttaaaccacacttggaggaatggcaatgatagaagcaacgagctgtggcggtgtggtaatctttcgtggcaaaatattactcttatacaagaactacaggaacaggtacgaggggtgggtactgcccaagggaactgtggaatctgatgaagagtataaggacactgcaatccgtgaagtgaaagaggagactggtgccagtgcaacgataatccaatacgtgggtaagagccactattcttttaccgtgccacatgatacagtggaaaaggatgtacactggtatcttatgatgggcgaaagttattatagtaaaccgcaaagagaagagtatttcatggattcagggttttacaagtatcacgaggcatatcatctgctcaagtttgcaaatgagaagcagatacttgagaaggcttacaatgagtacctggatttaaagaaaagcaatttatgggggacacacaagtattattagtattattaaaaagcagttttaaaaactgctttttgaggttttggaatgaaatggtatgaggatttatttgtaggagagtctgttaccggaaagataaagaaaatcaagtggaagatagagcataatgccggcatgcttcacacatacatcatcacgtttccgtcaaatgaggaaaatcttttggatatcattccgacaagagaattgctgcaaaagggatatccgaagaagaatctgcacataatcgcagtagcgggtaattatgatgaggcacttttgctggcctgtgatattgttagggagacatacgaaaatacaggtaaaacagatgtgaagagctatttaaagagcagacggaggaaatagatatatgatatttacgattttaaaggtcataggcatcatactccttgtagtgcttgctcttatacttacagcgctgctttgcgtactgtttgtgccggtcaagtacagggctgtcggaagctttgacaatacagacataagagcaaaagcacatgtgtcatggcttttgcatttgtttgcactgcatatagagtatgcacaggagactgacggatatataaggcttgcttttgtgaagaagaagctgtttgataattatgaggctttggatgatgacgatatggatgatgcagctaaaactgaaacagaagataaagtcagtgaaaacaccggagatgagcctgaaatatcggcagatgagtcagaacacatcacagatgaacagacagagaatgaaagcacatcacgtacgcataatgagtacaggtcagtaactgatgagaatcagcatataaaacaacaaacaaagctcacacatcaaaaaaggtataaaaagcgaaacaaaaagtcacataaaaagcaatttaaagataagtcagaaaaaataaaaaactgtatctataagctaaaaagagaatacagcgatgagagaaacaaagccgcttttttacatctgaaaaaagagctttttatcattcttaaaagaatatgcccaaggaggcttaagcttacaatggtttattcaaccggctcgcctgatacaacaggtatttcattggggattttagcatgctttcctgtcggctatacaaacagatggcggattacacctgatttcgagagtgaaaatccatatgcaaagggcagctttgatataaaggggcatgtgatagtaataagtattttagcggcaacacttagaattttatttgataaaaactgccgcagattatataataggataagcagataggaggaagatattatggcagataatagtttcaataacacagtagagtcacttttcaaggggatggacagctttatcactacaaagactgtagttggtgatgcgattcatataggggatacaatcatacttccgcttgtggatgtgtcgtttggagtggcagcaggagcattttcggcagaaaagaaaaataacggagccggcggtatgggtggaaagattcagccaagtgcagtgctcgttatccagaatggacagacaaagcttgttaatgtaaagaatcaggatggtatgacaaagatacttgatatggtgccggacattgtaagccgcttctcaaaggggaaaaatgatgaccttaatctcgacgatgtaaaggtagacgaggcagaggacgacaagcaggattaatttcatatatgtgagcaaataaaaaggacatccaaacggatgtcctttaaaattcaaaagattcaaaaataaagactaagctctctcaactttgccagatcttaaacatgaagtacatacatataacttctgtggaactccattgaccttgcaagaaaccttcttaatgtttgacttccaaacatgatttgatcttctatgagaatggctgacattatttccataatgaacacctttttcacaaattgcacattttgccatgatattgcacctccttgcatttcactaagcttaccatactcttaagctcacaacaaatgtattctatcagattaaaataaagaatgcaaggataaaatataaaaatatttgctttttgtgaaaaaaaaggtataataacattagctacgtcacaatatgatggaggtatatattatgaagggacagatggatacccaatatggacaaattttaattgatacagatgttattgcaacctatgcaggctctgtagctgtagagtgctttggaatagtaggcatggcagcggtcaacatgaaggatggtcttgtaaagcttttaaagagagattacctgaaccatggaataaatgtaaaggtagatgagaacaacgaaattaccattgattttcatgtaatagtagcgtatggtatttcaatcggcactgtttcggacaatcttatcgagacggttaagtacaaggttgagtcatttacaggaatgaaaattgcaaagatcaatatttacgttgagggcgtaagggtaattgattaaggaggactacaaaaagtggagatcacaagcattaattcaaagctccttgcaaggatgtttcttgcgggagccaagaatcttgattcaaaaaaggactggataaatgagctgaatgtattcccggtaccggatggtgataccggaacaaatatgacaatgacaatcatgtctgcggccaaggaggtcagctcgctcacaaatcctaccatggcagagcttgcaaaggctatttcatcaggctctttaagaggtgccagaggaaactcaggtgttatcttatcacagcttttcagaggcttctgcaaggttataaaggaatacgatgaaatagatgtcactattctttgtgaggcatgccagaaggcggttgagacagcttacaaggcagttatgaagccaaaggagggaactatcctcacagtggcaaagggcgcagcagaaaaggctctggagctgtcagacgaaacagaggatgttgtcacatttgttgaagaggttataaagcaggctgagtatgtgcttgaccagacaccggagatgcttcctgtattaaaacaggcaggtgttgtggattcgggcggacagggtcttgttcaggtattaaagggagcatatgatgcccttatcggcaaggagattgactatacaatcgagggcgcaccaacaggagcagctcctgcaaagatttcggctgagaccgaggctgagattaagtttggttactgcacagagtttattattgtactcaatgcgccaatgtcagacaatgaggagcacgcatacaaggcattcctcgagtcaatcggtgactctatagtcgttgtagctgacgatgagatcgtaaagactcacgtacatacaaacgaccccggacttgcactgcagaaggcacttaccttcggctcactcagcaagataaagatcgataatatgcgtgaggagcatcaggaaaagctcatcaaggattcacagaagcttgcagcacagcagaaggctgaggaagaggcttatgaagctgcttgtgctgatgaaaagacaaataacatgcctgcaaaggaaatgggctttgtatctgtttcaatcggagaaggcatgaatgaagtgtttagaggccttggagtggactatctcatagagggtggtcagaccatgaaccctagcacagaggatatgctcaacgctatcgagcatgtaaatgcgaagacagtatttatcctgccaaacaacaagaatatcatcatggctgcaaaccaggcagtagaccttgttgaggataaacagattattgttattcctacaaagactatcccacagggtatcacagcgctcgtaaattatatccctgaccacagcgcagaggagaataaagagcagatgatggctgagatagaaaatgtcaagacagggcaggtgacatatgcagtccgcgatactgagattgacggaaaaactatcaagcagaacgacttcatgggaatcggagacaagagcatcctttctgttggaacagacttaagggctaccacacttgagatggtagatgccatggtagatgaggattctgcgattgtcagcatttacttcggaagtgattctgatgaggactcagctaatgagcttgcggcagcaatcgaagagaaatatcctgatgtagaggttgaggtcaacgatggcggacagccaatctactattatgttatttctgtagagtaaagccatttaaagaatataaatgacatttattatatttaggagcagatatggatatagcttcaccgattaccgcggttaagggaatcggggaaaaaacacaaaaagcatttgctaaaatgggagtatacaccgttggtgatatactccttcattttccccgggattatgtaaagtttccggaaataacggatattgatgaactgaataatgtaaatgagagcagcacctatgccatccatgctgtgattaaaaaggcacctgtagtgaaaaatacagcgagaatgcagattacattgcaggatatcggctcgcccgggcatatgatacagctggtatggtatcgtatgccgtaccttaaggcacagcttgtgcaggggagacatcttatattttacgggcatattaagccaaagggtggcagatatgtcatggagcagccggtggtgtatgaggtgcaaaagtacgaggctatacgcgatacactgcagcctgtgtactccgtgacaagcggtgtgacaaacaatctgatagtgaagacgataaaggagactctgtcacatgatacattgctgtcagattatctgcctaaggatataaggcacagatacggcttttgcgagtataattatgccatgaagcagatacattttcctgatgactttgacgctcttgtggaggcaagaagacggcttgtttttgatgagttttttctctttatcatgggcatgcggtatcagaataaaaagcagcataaggacaaaaatgagtttgagtttacggatgatgcttttatagacggactgattgataagcttccgtatgagctgacaggcgcgcagaagaagacaatagatgagataaagcaggatattaaaagcccttatgtgatgcagaggcttattcagggtgatgtgggctcaggaaagacgattgttgcttttcttcttatggcgtgggcgtcaaaatgtggctatcagtctgccataatggctccgacggaggtgcttgcaaaccagcattatgagacgttttgctcactggttgggcagtttggacttgacagtcctgttgtgcttcttaccggctccatgacggcaaagcagaaaagagaggcctatgcgcgccttgaaaacgagaaaaatgcgcttattataggaactcatgcgctcatacaggagaaagcggatttttcaaatctgtcgcttgttatcacagatgagcagcacagatttggcgtgaagcagagagagagcttctcggataagggaagaaagccacatatacttgtgatgagtgccactccgataccgcgtacgttagcaataatcatatacggtgatatggatatctctgtcataaatgaggtgccggcaaagagacttcctatcaagaactgtgtggttggcacggcattcaggccaaaggcctacagctttattgctgagcaggtgagagccggccatcaggcgtatgttatatgtcctcttgtggaggaaaccgaaaactcggaaggggaaaatgtcacagactatgcaaatgtgcttaaagcggcactgccaaaggatgtcacggtagatgtgcttaacggcaggatgaagagcaaggcaaaggatgaggtgatgcagcactttgcaaataatgagtcgcaggtgcttgtgtccacaacagtcgtggaggttggtgtaaatgtgccaaatgcaaccgtcatgatgatagagaatgcagacaggtttggacttgcacagcttcatcagctaagaggccgtgtaggcagaggggatgcacagtcgtattgcattttcatcaattcgtcaaattcaaagaaatcaaaaaaacgtctggagatactaaataaatcaaatgatggcttttatatagcaagtgaggatttaaagctcagaggtccaggggatttctttggaatcaggcagagtggagaccttgcgtttgcacttgcggatgtgtatcaggacagcgatgtgctaaaggaagcatctgagatggtggatgaggtgcttgaggcagacccggctctttgtacaccggaaaacagaatactgaaaaagaaaatggatgaatttgcaaaagaacaattaaagaggatgaatctgtgatgagtttaaacggctaaaataaaagctgatatagcatgcagggctatgcatgtgtatatcagctttttgtcataagcggattggtgaatgtacgtgggccgtttttgaatagttattaaataaatataataagcttactcaatctgcctgatatcggatatgtccgggtgaatcgtgagagaatagtttgtgtaatacacgacaaagccggctgcgacaccgtttggctttttgacatttttcttttgcagatagtctatctcgaccttgtcggcatttttgcccttggagtagtagcctgcgagcttgccggcctcctcaaaggtgctatccggcagctctttgttttcagcttttacaatgacatgtgagccgggcatgcccttggcgtggaaccaccagtcgtttccggttgccagcttgaaggtgagctcatcgttctggtagttgtttttgccaacgtacatatcaaagccgtctgatgagatataatggaagggtttgctctttaccttctgtttctttgaaccctttccttttttgataaaaccgtattctatcagctcatcctttatctggacgaggtcgtcagcgcttaaagcgatatccagtgaattctgaattgattcgagatggtctatctgactttttgtttcaagaatcagctcgttcaatgcttcggcagtacgtttcatctttccgtatttgtcaaagtatttctgcgcattctcggcaggagtttttgtgttgtcgataggaattttgatgattttgttgtcatcataatagtttgctgcttcaagaaatttgtcgtccggtgtaagtccgtagccgaatgcgttgataagctcaccgtacaccttgtacttttcgcgtttttcggagtccttaagctgcttcatctgcagggaatatttcttctggtttcgctccaggagggtatttacgtgttttctcaaatcggctgacttctggcgtatacgtgtataggtgtttctctcagagtagtaaagctctaaaacctctgatatagattcatattttgtgaccgttaaatcgctatactgagtcagctctattgaagaaaattcctttggttcattgccgtcacgcacgatattcggcgtaaaacgattattttttatgtcctccatcatccatgtgaagttgcttcccaggtgcaaaagctcatcgtgtgagtaggcagctacaggggagtccgcgtcaaggcctgcccggtgagccagctcatttgccacaagagggctgatgccggaaaaggatgagtagatagcctttgaaacagtaagcggctttgctgatataatatccacaaactgcttcgaatctacagtcagaggattatatttatcctcctgagtcgcggggatggtgtaggctctgcccggaagcacctctcgcacagagcttacggatgcgggaatacgcttggcactgtctattatcgtaccatcggagtcggtaaagatgatgtttgaatatttgcccatcagctcgataataagcaccttgtggcatagatcgcccatctcgtttaagtgctcgatttcaaagtttatgatacgctccatgcccggctggtaaatctttgtgatgcgtccgtttgctatatgctttcttaaaaccatgcaaaatgtaggggcagtgagagggcttaccttatttgtgggtgtcaggtagatgaatggaagcgatgcacttgcagacatcgaaagcctgaacgagccgttttgtccctttagggtgagaagcagctcatctgcttcaggttctgcgattttactgatttttgagtttagtatcgtgctgtttagctctgcaactatatttgaaatgactattccgtctaaagccatgatgttcctccttatttcctgtaaatattctaagttgctgaatatttataatcatgaatatttatattataatatatttgacgaaaatctcaaggagttatataataaactcatctatgcatatgcgaaaggaaaaattatgattaaaagtatgaccggctttggcagatacgagtacgcagatgcaagccgtaagattacagttgaggtaaaatctgtaaatcacagatatctggatgtcaatatcaagatgcctaaaaagctcaatttcttcgagagtgcaataaggactctgcttaaggagtacatagagcgtggcaaggtcgatatttatatcacatatgaggattttacagaaaataatctctcattgcagtataataaggctctcgcgggagaatatcttaagtatctgaatcagatggcggaggaattcggactggagaatgatataagagtgagcacgctgtcgagatatccggaggtatttgcgatggaggagcagcctgtagatgaggatgagctgtggagcagtcttgagaaggctcttcgcggtgcatttgagccatttgttgaaagccgcgtgcgcgagggagaaaatcttaaaaaagacctttgcgaaaagctcgataatatggtatcatatgttgatttcattgaggagcgttcgccacagattattgcagaataccgtgcgcgtcttgaggaaaagctaagagagctgcttgcagacaatcagcttgatgattcaagaatagcccaggaagtcactatttttgcggacaagatctgtgtggatgaagagacagtcaggctcaaaagccatatcctttccatgaaggattcgttaaatgccggtggcagtgtgggaagaaagcttgatttcctcgcacaggagatgaaccgtgaggcgaataccatcctttcaaagtccaatgatcttaagatttctgacacaggcatcagtcttaagactgatatagagaaggtcagggaacagattcaaaatattgagtaattttaggagattgtgatgagtaacacaggaaaattagttgttttttcaggcttttcgggttccggaaagggtactatcatgaaggagcttatggcaaagcatggtgatgattatgcactgagcgtatcagccacgaccagaggtccaaggccgggtgaggagcatggcagagagtatttttttatctcagaggaagaatttgaacagatgataaaggcagatgggctgcttgagtatgccaagtatgtagatcattactacggcacaccaaagtcatatgtcaatgagcagcttaacgccggaaagaatgtgattcttgagatagaaattcagggagctttaaagataaagaagcagtttcctgatacggtgcttatgtttgtgtcagcgccgagtgcagatgagcttaaggaccggcttgtaggaagaggcacagagacaaaagaggtctgtgcacagagactttcaagagcatatgaggagtctttaggcatagagaaatatgattatttagtggtaaatgataagcttgatgattgtgtagagcttgtgaatgacatcatccacagctctgacgacacaaaaaagaatcaggattatctggtatcatcaaatatagattttataaataaaatgagaaaagagcttttaagcttttcgaaaggagataaataatatgatacatccatcgtatgtagagttaatgaaggtagtaaacaacaatgtagagataggtgaagagccggtagtaaacagccgttattctatcgttattgctgcagcaaagcgtgcacgtcagattattgatggtgcagaaccgcttatcgcacgccctaagtgcaataagccattatctattgctgtagaggagctgtacacgggagctgtcagaatcgtctcagatgatgaggatttaaacgaaggcgaagaggcttaatctaggaggggaaaggctgttttgtctttccctttaattgtaaatacttacatttgagaggtactatgaaattattatttatttcgcttggatgcgataaaaaccttgtggattcagagtatatgataggcatgcttgcaaatgacggcatagagatgaccgatgatgagacacaggctgatatcattatcgtaaacagctgctgcttcataggtgatgcaaaggaggagagtatcaatacaattctcgagatggctcagtataaggagaccggcaaatgcaaatcacttattgtgacaggctgtctggcacaaagatacaaggatgagatttttaaggaaatcccggaggttgatgccatacttggtaccaattcatatgatactatagttgaagctgtccatgagacacttgaaaaacacagatacagcaatctgcacaccttagagggacttcccagcataaagacaaagcgtattgtcaccacaggagggcatttcgcttaccttaagatagcggaggggtgcaataaaaactgcacctactgtgtcattccttcagtcagaggccgttacagaagtgtgccgatggaggatttgattgagcaggcgaagagccttgtggagcagggggcaaaggagcttatacttgttgcccaggagaccacactttacggagtggatttgtatggtgagaagtcacttcataagcttttggatgagctcaacaagataagcgggctgttctggataaggattatgtactgctatcccgaggagatatacgatgagcttatagagtccatgataaaggatgagaaggtatgccattatctggatatgccaatccagcactgcaatgacgatattttaaggcgcatgggaagaaaaacaacaaaggctgagcttatggagcgtatcagaatgctgcgtgagagaatacctgatatcacactaaggaccacacttatatgtggcttcccgggtgagacacaggataatcacgaggagcttatgcagtttgtaaatgatatggagtttgaccgtctgggagcctttacgtattcccctgaggaaggcacaaaggcagctgcaatgcctgaccagatagatgaggatataaaggctgaatggcaggctgatgtcatggagcttgaggaagaggtcatttttgataaaaatgagacactaaagggtaaagaattatatgttttcatagagggcaaggtggctgatgaaaatgcttatatcggccgtacatacagagatgcaccgaatgttgacggatatatattcatcaacactgatgagacacttatgaccggtgatatatgcaaggttatggtgaccggtgcgtatgaatatgatttgataggagaacttgtaaaatgaatttaccaaacaaacttacaatcttaagagtgatacttattccgttttttgtatttttccttatttcaccgttttttgacggatacggaaattatatagcacttgcgatatttatcattgcaagtctgaccgatatggctgacggaaaaattgcaagaaaatataatcttgttacaaatttcggcaagtttatggatccgcttgcagacaagctgcttgtatgctctgcaatgatatgccttgttgatttaaagcttatccctgtatgggttgtgcttattatcattgcaagagagtttatcataagcggtttcagactggttgcatctgacaatggaattgtcattgcggcaagctactggggaaagtttaagacaaccttccagatgcttatggttattgttattatttttaatatcaatctgcagcttggctggttaaatatccttggaacaatcctcatttatgttgcacttgtgctcacagttgtttcgcttattgactatattgcaaagaataaggacgtcttaaaggaccagaaatagactataacagggagaaaagtatgagaataatagcaggaacggcgagaagcctccctctaaagactattgagggaaaagatacaagaccgactactgacaagacgaaggagactctttttaatgtcatgcagtttgatgttcccggagcatattttttagatctgtttgccggaagcggacagataggacttgaagcgttaagccgcggtgcagcctatgctgtatttgtggagaattcaagaaaagccgcttcatgcatcgaggacaatatccattttacaaagtttgataaggtctcaaggctcatgatgacggatgctgtcacggcagtacgtacgcttgagggcaaatacaaatttgatatcgtatttatggacccgccatacaataaggagcttgaaaaggaagtgcttattacactttcggacagtgatatattaaaggatgatacacttatcgtggttgaggcttcaaacgatactgattttgattatctcacagagcttggctatgagatagtcaaagaaaaaatttataagacaaacaagcatgttttcataaagcgtgcataggagatacaatatgaaggtaggaatttatccgggaagctttgatccggtgacatttggacacctggatataatagagcgttcagccaaaatagttgacgagctggttgtcggagtactcaataatagtgcaaaaaactcgttgttttctttggaagaacgtgttagtatgataaaggaaatgacagcacacataccaaacgtgagagttgggtgcttcgaaggtcttttagttgactacatgaagaaaatcaatgcaacaatcataataagaggattgcgtgcagtgacagattttgagtatgagctgcagattgcacaggctaacggagtgcagaatccggaaatagagacggtttttctcacttcgagcctcaattattcatatttaagctctacaattgtcaaggaatttgcatcatacggaggagatatatcaaagttcgtacctgaacagttcattgatagaatttatgctaaatacaatattaccaggtaaggagacagtatttatgagcagtaaaatggaacagattattgaagaaatcgaagactatattgatggctgcaagccgtcacctatttcaagaaacaagattcttgtcaatcgtgaacagttagaggagcttctttcagagcttcgtacaaagacccctgaggaggtcaagagatatcagaagattatcagcaataaggaggctatccttgctgatgcacaggcgaaggcggatcagataatcgcgcaggctcagattcagacaaatgagcttgtcagcgagcatcagattatgcagcaggcatatgcccaggcgaatgaggtagtgcagattgcaacaaagcaggcacaggagatacttgacagtgccacaaacgaagcaaataatctcagaatgagtgccatggcatatacagacagccagctcaagagcattgaggacatcttaacaggctctattgagacttcaaaggccagatatgacagccttataagttcactgcagcagtttgaggatgttgttgcagcaaacagagcagagcttttcccaccggaagagaatggcgatgaagctgcaggagcagagttgtctgacaatgaggcagcttcagatacatctgatgatgacatagaaatcaccaatatttccgattcagatgaggatgcgaaataggataatacataacaggcatgagagtatgctcatggctgccttaagcagtatgtatctgtaaagcctaaagcctgtatcccggaatattgatttggtctggaccatgcatgatacaccgccaaatgacagaagtgcaatgcacagcactattgacagggtgcgtggaatgcatagaccgcagactatgccgataccgtttgtggtttcaaaaaaggcacctattatgtctgccgacagtggcatgttgcagtcagccttttgggcaatggtctgtgggatacgtgagactatagagaacaatacaatatatccacagagttttataagggtttcaaaccctttcattattccggcatcaacgatttgcatgttaagcttaaatccttgagccgggattttttgtgttaagcttttgtttttgttaatcgaaagcatagctatcattcctatagcagatggcagataaagtgacacaagataaatgctgtagtggctgcatatgttaagttgctcggacagtgcataggtaatgataaagggaaggctgaaatggtttgccagtgcactcagtatttccctgtgatttttatctatgtatcctttcgaacaaaaatctgctgtgagctttgctcctatcgggaatccaaatattatgcctattatgtatgtaaaaagcatgatatgcttttggggaatgttttgcagcacatttgttgagataatcaggttagataaaatcgtaaatataaatagaagcggaaatatctggttgaaccatagcattatgcctgctttagcgcatgcacttacctgtgccggaaacgatatgtaataaatgcaaaataccagtataaaagcaataaacagtgatttttttagtttgtttttactcatatgacagtatatgtggagagaaatatcaatatgattcgattagataaatttttatcagaaatggggcttggaacgcgctccgaggtaaaaaagcttataaagaccgggcagatagccattaatggcactgtggccgtaaagcccgagacaaaggtagatactgctgccgatgaggtgtcagttaacggcagaataattaagtatcaaaggtatgagtattatctgttcaataagccctcaggctgtgtttctgcgacaaatgacaatgtacataagactgtcatggactatatcacggatgctgtgcatgatgatctgtttcctgtcggaaggcttgatatagacacggaggggcttttgcttatcacaaatgatggagcactttcgcatgagctcttaagtccttcaaagcacgtggcaaagacttactacgcacgtattgatggtgaggtgacctgggatgatatcatcaggtttaaagagggcattgatataggcgaggaaagacctacaaagcctgcggagcttgttattaaaaaaagcggcagcgtatccgagattgagcttacgataacagagggtaaattccatcaggtcaagcggatgtttgaggcgcttggaaagagggtaatctatttaaagagaatatccatgggaccgcttaagctgcctgctgaccttaaaacagggacttacagagctttgacacaggctgaaacggatatgcttatgcagataaaatccggcaaataaaataatttttaattatgaggtatgatatgagtaatggttttttaccaatttcaaaacaggatatgatagatgagggcattgagcagcttgattttgtgtatgtctgcggtgatgcatatgtggatcatccgtcctttggacatgcaataattgcaaggctgctgcaggcacatggctatacggtcggcatcatttcacagcccgactggaaggatgatgagtctatatccatactcggagtgccgcgccttggctttttggtttcggcaggtaatatggactccatggtaaatcattattcggtttcaaagaaaagaagagcaaaggattcctttacaccgggtggcgtgatgggaaagagacctgattatgcgaccgttgtgtactgtaacctgatacgccatacttataaaaaaatccctatcataataggcggcatcgaggcgagccttaggcgcatggcgcattatgattactggtcaaataaagtcaagcgctcaattcttttagattccggtgcggatatcatctcatatggcatgggagaaagaagcatcatcgagatagcggatgcgcttgccagtggtatggatgtaaaggatataacgtttatagatggtaccgtgttcaagacaaaggacagggatatcatatatgatgcgattgagcttccggattatgacgttataaaagaggataagagggagtttgcaaggagcttttacatacagtactgcaatactgatcctttctgcgcaaagaggctcatagagccatatgacaactctacgcttgtggtgcagaatccaccgcagaagccactgtcgcaggatgagatggatgaggtctatgcactcccttatatgaggacttatcatccgagctacgaggaggcaggcggagtgcctgctataagcgaggtgaagttttctcttatcagcaacagaggctgctttggaggatgtaacttctgtgcactgaccttccatcagggcaggataatccagacaagaagtcatgagtcaatcatagaagaggcaaagcttatcacgcaggataaggactttaagggctatatccatgatgttggaggtcctacagcaaatttcaggcagccggcatgcaaaaagcagctcacaaggggtgcatgtcctacaaagcagtgcctgtttcctaagccgtgcaacaacctgatagttgaccatagtgactatatacagcttcttagagagcttcgtgcactgccaaaggtgaaaaaagtgtttatccgctcaggtatcaggtttgattatctgatgtatgataaagacaagacgtttcttcgtgagctgtgtgagtatcatgtcagcggacagctcaaggtagctccggagcatatctccaatgctgttttgagcaggcttggaaagccgagtgtagaggtttacaacagctttgtgaaggcatacaaggatatgaacaaaaagataggcaaggagcagtatcttgtgccgtatctcatgtcatcgcacccgggctcaacgcttaaggaggcgatagagcttgcagagtatctgcgcgatctgggatatatgcctgaacaggtgcaggatttctatccgacaccgtctaccatctctacatgcatgtactatacaggtcttgacccggcaacacttaagccggtgtatgtcacaactaacccgcatgagaaggctatgcagagggcactcatccagtaccgcaatccaaagaactatgatctcgtgcacgaggcacttgtgaaggccggcagggaggacttaatcggatttgacaaaaagtgcctgattaagcctagaaaaatgcatgctgatggcggctgggacaaaaaccgtaccgggtccggtaaaaattcaaacagcagctatggcggcaagaatacaggtgtaaggaaaaacttgaaaaatgcaacagagcgggggaaaaacggaagcggaaataacactgcaggcacagcgcacaaaaagaaaacaatcagaaacgtccacaagaagaaaagatagataaagactatgaaagaatttaaagcgggtaaaaatgaggcaggccagaggcttgacaaataccttaaaaagatacttccaaacgcatccatgggatttatttacaagatgctcaggaagaagaacataaaactgaatgataagaaagcgtcaggcacagaaattgtgtcagttgacgacaaaatcaagatttttctgtcagatgatacatttgctaagttttccgtcaatgaggacagtctgatgaaggattttaaggcacttggtgcactaaagccggacggactgggtgtggtatacgaggatgatgacatactggcggcaaacaagcctgtcaatatgctttcacagaagtccaaggagagtgatatttctgcgaatgaaaggcttatcggatatctgataaaagagggaaagcttgattttgatacatataagagctttaagccatcggtgtgtaaccgccttgacagaaatacctcaggactgattctgatgggtaaatcgcttcatggactgcagtacctgtcacaggtgcttaaggacagaaccgcagaaaagtattatatggcgcttgttgcaggagaggttgatgagcctatgaccatagagggctttctgacaaaggatgaggctgtaaataaggtgcagataaccaaggagcctataagtgatgaatcactgccaataaagactgcctacaggcctcttaagacaattgagatgagtgcttcgtgccataaagcaactcttcttgaggtgcatctcattacaggaagaagccatcagatcagagcacatctttcatctatcggacacccaatcataggtgatatgaagtatggggataaaaggattaatgctttttacaaagaaaattatcatgtgaccagccagcttttgcatgcgcaccatgtgattttgcctgatggcagatatatagaggcggctttgcccgacatatggagcagagtggggctttaatttcgtcattatttactttacatcgcatagcttacagtattaaggaagatagaaacgatatggcaacctggaattcaagaggcttaagaggctcgaccttagaggacatgataaacaagacaaatgaaaaatacagggagaacggcctggcactcatacaaaagattcccactccgattacacctataaagatggagccggaaaccagacacattacactggcttattttgagcagaagagtacggttgactatattggcgctgtacagggaatcccggtatgctttgatgcaaaagaatgtaataccgacacgtttccccttgccaatatacatgagcatcaggtagagtttatgagatgctttgaaaaacaggatggtgttgcatttatccttatatcgtacacacacaggaacgaatactattatctcacgtttaaaaaactgacagaattctgggatagagctgcagaaggcggcagaaagagcttccgctatgaggagcttgagccggcatttttcctcccggaggtgcccggaatacttgttccgtatctgaacgcacttcagcttgacttaaattgcagggcttgacagtattactatcgtatggtagcatattaccacgataacactttactacatgaaagcgagattttacacattatggaaaatcaattattacacactccggacggagtaagagacatatataacggagaatgcaaaaaaaagctgtatttgcaggataagctgcaccatacacttttaaaatacggatatcatgatatcatgacacctacatttgagttttttaatatttttggaagcgatgtcggaacaaccccttcaaaggatttatacaagttttttgacaaggagggcaatacgcttgtccttcgtcctgatttcacaccttctattgcaagaagtgcggctaagtactatatagaggacgatatgcctgtcaagctgtgttatcttggcaatacctttatcaattcatcggattatcagggcaggctcaaggaaagcacacagtgcggtgcagagctgataggtgatggctctatctctgcagatgccgagatactttcgatgacggttgagtcgatgtttgagagcggacttaagaatttccagatttcagtcggtcattcgcagttcttttacggtctcacaaaggcagcagggctgtcagtagagcaggaggaaaacctaagagagctcatagcaaataagaatttcttcggcgtggatgagtttgttgacagtctttcaatgaacgacaagctaaggaagctgtttggactattagacaatttcgatttacaggatgagcagcttatggaggctttaaagcttgcaaagggatatgatgagatattatcatctattgatactctgcttaagcttcgagaatacttaaaggcatacggcatcgagaaatatatttcgtatgagcttggacttatcagtgactacacatattacacaggtatcattttccagggctacacatatggtacaggagagcctattgtaaagggaggccgttatgacaagctgctttcacactttggaaaggacgctgctgcaatcggctttgcgattgttgtggatcagctcatggcagcattaagccgtcaggatattgatgtgcctgtcattgagaattgctcacttatagtatttgaggaggctgcataccatgcggcaatcaagcgctctatggagcttcgaagagatggagtaaatacacagatggtgcttaaggacaaaaataaaacgaaagaggactatgcttcatatgcggtagacaaccgtataaacagagttgagtttatagaggaataaaagatgagtgatgacagatatttaacctttgccctgggaaagggcagacttgcaaagaagaccctgcagctttttgagcagataggcatcacctgtgaggagatgaaggatcctgataccagaaagctgatttttgtaaacgaggagcttaagcttagatttttcctggcaaagggacctgatgtgcctacatacgtggagtatggcgctgccgatataggtgtggtaggaaaggataccatcctcgaggagggcagaaatatatacgaggtgcttgatttaggctttggaaaatgccgcatgtgtatatgcggaccggagagcgcaagggagcttttgcagcatcatgatcagataagagttgccaccaagtatcctcatatcgcaaaggattatttctacaataaaaagcatcagacggtagagattataaagctgaacggctcaatagagcttgctccgattgttggactttcagaggtgatttgtgatatagtagagaccggaactacacttaaggagaacggacttaccgtgcttgaggaggtctgtccgctgtctgcgagggttgtggtaaaccaggtcagcatgaagatggacaatgagcgtatcacaaagctcataagcgatttgaagactgttatcaaatagcgtataatttatatcaatacatgattttagacggaggctgtaatgagaattttaaaacttacaaaggattcacagaaaaacatattggagagcctgcttaagagaagccctaacaactatacagagtatgagagcacggtaaatgagattataaacaatgtaaaggaaaaccgtgacaaggctgtttttgaatacacaaagaaatttgataaagcggatgtggatgcatcaaatatccgtgtcacagaggaagaaataaaggaagcatatgagctggttgatgagaagcttcttgctgttataaaaaaagctcttgtaaatatcagaaaatatcacgagaagcagctgcagaactcatggtttacaacagaggacggcatcattttaggacagaaggtcacacctatagcaaaggcaggagtatatgtgccgggcggcaaggctgtctatccttcatctgtgctgatgaacgtgcttcctgcaaaggtagcaggcgttgaaaagattgttatgtgtacaccatgctcagctgatggcaaggtatatccttccacacttgtagccgcaaacgaggccggagtagatgaaatctacaaggtaggcggtgcacaggctatcgctgcaatggcatttggtacagagagtgtgccaaaggtagacaagattgttggaccgggaaatatctttgttgcccttgccaaaaaggctgtgtttggatatgtcagcattgattcaatcgcaggtcctagcgagattttggtgcttgcagatgagactgcaaatccacgctatgtggcagcggatttactctcacaggctgagcatgatgagatggcatcagctatcttgatcacaacaagtgaggagcttgcaaagaaagtatcagaggaagttgataagtttgttgaagttctctcaagaaaagaaatcatcgagaaatctcttgaaaactacggatatatacttgttgcagaggatatggatgaggcaattgatgcagtaaacgatatcgcttcagagcatatggagattgtcacaagagatcctttctcagtcatgacaaagatcaaaaatgcaggagcaatctttatcggagagtactcatcagagcctctgggagactattttgcaggaccaaaccatgttctgcctacaaacggaacagcaaaattcttctcagccttatctgtagatgactttatcaaaaagtcaagcattatctcatattcaagagaagcgcttgagaggatacatactgatattgagcagtttgcagagtgtgagaagcttacagcacatgcaaattcaatcaaggtaagatttgaggattagtcaaaggagtaggaaatggcagatcgatgcgctaagcttagcagaaaaacaaaagagactgatatttcggttggtttaaatatagacggaaccggaaaatcaaatatagacacaggcataggcttctttaaccatatgctggagggattttcaaagcatggtttttttgacctcgatatggtgtgcgacggagacttaaatgtggactgtcatcatactatagaggactgcggcatagtgcttggtaatgccatagcacaggctgttggagacaaaaagggcataaagagatttggaagctttattttaccgatggatgaggtgctggtgctttgtgccatcgatttatcaggcagaccttacctgcagtttgacggtgagtttacctgcgagagagtcggagatatggatacagagatggtgagagagtttttctatgccgtttcttactctgctgcgatgaacctgcatataaaggttttgacaccgggaaataatcatcatatgatagaagctatgtttaaggcatttgccaaggcacttgacgatgcctgcacctatgatagcagaataaaggacgtgatgtccacgaaaggaagtttgtaatttgactggttttaagaacatcgttgctacactgtatttaaagaacggtcaggccgtgaaatcagcgtcagatatgacagtgatgggcgacgtctacaatctgtgtcagctctacaatgacagtggcatagacaagattattatttttgatctttcaactgatgatgatgaacatgagaaaaacatacatacgatagaaaatataaacagaaatatcgacataaaggtgtgcgccggaggcaatatcaaccgcatagaggacgtgaaaaagctgctgtatgcaggctgtttacaggttatatttaatgccacaaaggactcaagccttgggcttgcaaatgtggcaagcgaaaagtttggcaaggataaaattcttttgtcaatcagcaatgtagactatattttcaagcatcaggaggagatagaggatacctttcatgagcttttggtcttgaacatagatataatagatgcccttgagaatctcacatccacaccatatgtggtctatatgccgcagtttgacatggataaaataatcgatgtcatgaagcgtgaaactctaagaggaattgcaggagagtttatcaacgatcctgaaaatgatatcatggcgttaaagacaaagctttctgacggaggaatacttgttgacaattttactcccgacttaaagtggtctgatttaaagcttaattctgacggcatggtgcctgtcatagtgcaggattaccgcaatgagcaggtgcttatgcttgcctatatgaatgaggaggccttcaatgtcacgataaacagcggacgcatgacctactggagcagaagccgcaatgagctttggaccaagggtcttacatcaggacatttacagtacgtaaagtctttgacagcagactgtgattatgatactatccttgcgaaggtttcgcaggtgggagctgcatgtcacacaggtaacagaacatgctttttcaataatatcgtgaaaaaggagtatgtagagaagaatccacttacagtgcttgaatcagtctatgcggtgatagttgaccgtatgaagaatccaaaggaggactcgtacaccaatgccgtcatggaaaagggcatagatgagatattaaaaaagctcggacacgagtgcactgagattattctggcagccaaaaatccggacagtgatgatttgaagtttgagatatcggactttatgtaccactgcatgattcttatggctcagaaaaatatcacatgggcagaaatcgcaggggagctggcacagcgatagccttaaaacacaataattatttagaggaaattatatgagaaaactagctttaagtgatgagatacttatgaaggtagacaaaccggctagatatatcgggaatgagttcaactcagtaatgaaagacacatcgcaggtaaatatacgttttgcgatgtgttttcctgatgtttatgagattggtatgtcacatctgggaatccagatattatatgatatgttcaaccgcatggatgacgtgtggtgcgagagagtttattctccgtggcctgatctgcatgaaatcatgaagcaggagaatataccgcttttcggacttgagtcgcaggagcctataaaggactttgactttgtagccatgactctgcagtacgaaatgtgctacacaaatattttgcagatacttgacctcgcacagataccgcttcgttcaagggatagagcggaaggctgccctatcgtgattgcaggcggtccttgtacctacaatccggagccgattgcggacttctttgatatattttatatcggagagggagagacacagtatggcaatctctttgagctttataagaaggcaaaggctgatggtctttcaagggaagagtttttacatgaggctgcaaagattgagggactttatgtgccggcactgtatgaggtggagtacaatgaggatggaacaatctgctgtatgaagcctaagtatgatgatattcctgtaaagataaaaaaacaggtgcaggtagatttgacgaactcaacttacccagaggcaccggttgtgccttttatcaaggctacgcaggatagaatggtgcttgaaatacagcgtggctgtataagaggctgccgtttctgccaggccggtatgatttaccgtccaaaccgtgagaaaaaggttgagcacctgaaggaggttgcagcagctctcatcaaaaataccggacacgaggagatttctttaagctccttaagctcatcagactacaaggagcttgacgagctcatcacatttttgcttgatatatgcaaggaaaagaagataaatatttccctgccttcactcagaattgatgcgttttcactagatatcatgcagaaggttcaggatgtcaaaaaaagcagtctgacctttgcgcctgaggccggtacacagcgccttagaaatgtaataaataagggtcttaccgtggatgatatcatgaacggctcaagacaggcctttgagggtggctggaacaaggtgaagttttatttcatgctcggtctgcctactgagacagaggaggatatgagaggaattcctgagcttgcaaacgatgtggctgcattatattatgataccgttccaaaggaaaagagagccggaaagtgtcagataactataagcacatcatttttcgtgccaaagccttttacaccattccagtgggcgagaatgtatgagccttctgagtacctgggcagggccaaaatagtaaatgaccatgtaaaggagcagctcaacagaaagagcatcagatacaactggcatgaggcatacgtcactgtgattgagggtatactggcaagaggcgacagaaggctttgcgatgcgatagtaaaggtatacgaaaagggcggatattatgatgcctggacagagtattttgactatgacagatggattgattcgataaaggaatgcggactggatccggatttctacacgatgagagaaaggcctttagatgaagtatttccatgggattttatcgatataggcgtgacaaagcagtttatgataagagagtgggagacagcccataaggagacagtcactcctaactgccgcatgaggtgctctgcctgcggtgcaaagagctatggaggaggtgtctgctatgaaaattagagtgaagtttaaaaaatggggctgcatgaagtttataggacatctcgatatgatgagatacttccagaaggcggtcagaagggcagatattgatatacgctattcagagggctattcggctcaccagattatgtcatttgcggcaccgcttggagtgggcatcacaagtgatggtgagtactttgacatagatgtaaatacaacagagtctacagaaaaaagcatagcggctttaaatgcccagatggtggacggagttgaggtgacaggatatgtgcttttgcctgatgatgcaaagaaggctatgtcacttgttgcggctgcagactatgtgcttagcttcaaggagggctatgagagcccatacaccatagaggagtggaaggaagcgataaataagcacttttttgacgagccatcctttgttgtgatgaaaaagactaaaaagagtgagagagaggtagatataaagcctcttgtatacaagcttacagtcatggaaaataacaaaaagcctgagtttttcatgcaggtatcaacaggaagcattgacaatataaagcctgagtttgtgcttaacgccatatacgaaaagtgtggccttgattataatccgcttgccatacaaatccacaggcaggaagtgtatgcaagaaaagacgatggaacactcatttgtctgcttgacatgggagaagaaatctcataatgaacagaattattctgactaaaacagtaaaaaataataatacatacacagtgtatgcaatgatggatgaaaacggaaattataaggatttccagctccttcccgagaaggatacgataataaacaacatatacgcagcaagggtaaataagatactgccgggcataaatgcggcatttgtgaccattgcgcagaataaaagctgttatctgtcgctaaatgatgcaaaaaatcctgtatacacaaacaaaaaatcaaaaaaagaaggattgtgtgagggcgatgagatacttgtgcaggtcataaaggatgcgctaaagacaaaggatccggtggtcacaacaaagctttctatattcggaagcaatgtgattctcactaattttgatacacagataggtgtttcatcgaagctggataaggaaagggcggctcttttacgtaaggctgtgctttcaaagtgtgcagaccacgaaaaagagggctatggcatcatagtcagaaccaatgccaaaaatgtggaggataaagcagtttcgcaagatgcgtattctgtagcacagaaatataatcagataataaaaaaggcaccgcatcaggcactctattcatgcatatatcatgggatgagcgattatctgcttttaatgaagacgattgattttgccacggtggagtggataaagacggactgtgatgacatatatgacagtcttcttacggagtacggcatatatgaccatgctcctgaaaagataatgagatatgacgattcagctattagcctgtcaacactctatggcataagagggctgattgataatctgacatcgcgcagggtttggctggactgcggtggcaacatcataatagagcagcttgagacacttacatttatagacgtaaacagtgcaaagaatatatcgtcagggagcaacagcatattaaagactaatatggaggctgcaaaggagatagcaaggcagcttaggctcagaaatatctccggcatgataataattgattttatcaatatgaagtctgagacatcaaaggatacgcttattgaagcgctcaaacggtatataaaggacgataatacagtctgtacctttgtggatatcacgaagcttggactggtggagctgacaagaaagaaggttcacaaatctcttaaacaaattttagaaaaaacacttgacgaatagatggctctatgctaatatactggagtatgccgcacagtgaggtataagtttgcgacttttcgcagcaccgtaactggcgagtaatgataaataggaggtgccatatgtacgcaattatagcaacaggtggtaagcagtacaaagtatctgaaggcgatatcattaccattgaaaagcttggcgttgaagctggtgagaaggttacttttgatcaggttttagttgtaggcggagatgatctcaaggttggagatccaacagttgcaggtgcaacagttgaggcttctgtagttaaagaaggcagagctaaaaaggttatcgtttacaagtacaagagaaaaaccggatatcacaaaaagaacggtcacagacaggctttcacacaggttaagattgaaaaaattaacggataatgatagctataaccgtttatcagaattcaaaaggacataagatgggctttaagtcaatgggacatgcaggttttgcagattccggttatgatataatctgtgccggggtttcagtgctggtgatcaacttcatcaattctgctgaagagctgtgtcatgctaagtacagtcttgatacagacgaagagacaggtatgattgactacagacttgacaagccggcaacaggtgatgttgcactgcttatggattccatgattctgggactaaaaggaatacaaagagactatgggaatgagtacatcattctagacttcaaggaggtgtaagacatgttgaatatgaaccttcagttttttgctcataaaaagggagttggttctacaaagaacggacgtgactctgagtctaagagattaggcgctaagagagcagacggacaattcgtaaaagctggtaatattctttacagacagcgtggtacaaagattcaccctggtacaaacgttggtatcggtggagatgatacattatatgctaaggttgatggcgtattaagatttgagagagttggaagagataagaaacaggcttccgtatatccagtagttaacgaataagatttaaaccccgacttttattagccggggtttttatgttatcaatttgttataaagtatactgagtgttttatgcagacattcagcatgaggtggaaaattatgtttgcagatcgtgcaaaaattatcataaaatcaggaaaaggcggagatggtcatgtatcgttccgccgtgaaaaatacgtgccgaacggtggtccggacggcggtgacggaggaaagggcggagacgttatattcctcgtggataagggaatcaacactctgacagattatcgtcacagaagaaagtttgcagcagagcccggacaggagggcggcaaaaagaactgccacggaaagaatggtgaggatcttatacttaaggtgccggagggtacactcataaaagatgcagcaagtggaaaagtcatagcagatatgtccggtgacaatacaaggcaggtgatcctgcgcggaggaaagggtggtcagggcaaccagcactatgccacatcgaccatgcaggctcctaaatatgctcagccgggacaggatgcaatagaaatcgaggtacagcttgagctaaaggtgatagcggatgtagggcttgtaggctttccaaacgtaggaaaatcaacacttctgtcacgagttaccaatgcacagccaaagattgccaactatcatttcaccacattacagccaaatcttggtgtggttgatatggatgagggctttggcttcgtaatcgctgatatccctggacttatcgagggagcatcagagggcataggactcggtcatgagtttttgcgtcatatagagcgtaccaaggtcatgatacacatggttgatgcggccggtactgaaggccgtgatccggttgctgacatcaaggcaataaacaaagagcttgaagcatacaatccacagcttctcaaaaagccgcaggtcattgcagccaacaaaatagacgccatagcaggagacgagaatgaggtgatttcagccttaagagccgaattcgagccacagggcataaaggtattcccgatatccgcggtaagcggtaaggggcttaaggagcttttgtacgaggtgaagaacctgcttgcaaattgtcctaaagaggttactgtatatgagcctgagattgatcctgcactttcattctttaaggatgagccgtacgcggttgaggtggcagccgatggtgcatatgagatatcaggtccaaagattgagaaaatgctcggatacacaaatatggactcagagaagggctttgccttcttccagagatttttgcgtgagcagggtatcatcaaggagcttgaaaatatgggaattgaggatggagatactgtccgcatgtatgatttcgagtttgattattacaagtaaggagaagagtatatatgaatttatcaagtaaacagcgtgcatatttaagcagccttgcaagcacaattaaccctattttcaatattggaaaggcatcgcttactccggaaatcattgaggctcttgatgcagcacttgaaaagagggagctgatcaaggttgcagttcttaaaaactgcatcgatgatccaggagagattgcaagtgtaatcggtgagaggacacactctgcagtggttaaggtaataggcaagaaaatgattttttaccgtccggcaaagaaaaatccaaagattaagcttccggaataagccatgaaaacagggatttttggcggggcatttgacccgatacacaaaggtcatatatacatggcgcaaaaggcaatggaagagtatgctcttgacaggattctgattgtcccgtcaggtcactcgccgaacaaaactgagaatgcaatgacagcatttaaccaccgttacaatatgtgtaagctggcagcagaagcagtgcccggtattgaggtgtctgatattgagataaaggatgagtccaccagttatacgtatatgacacttcaaaagctaaaggcactttatcctgaggacgagctgtatttcatcatgggtggtgattcgctcgactattttgaaacatggatgagaccggaggtcatagctcaaacagcaattattcttgttatggtgagagaaaattttccaaggctgcagatggaggaaaagattgctcatatcaaaaatctgtttcctgctgatataagacttttgagctgtgacaggatggatgtgtcgtctacgcaggtaagaggacttttaaaagcagagtcaaaggttgcagagcacaggagccttgcgagcacagatatgtttctggatgccgcagttatgtcatatataaaggctaataatttatacaggtgatagagtatggaagtaaaagaaattaagaaaaagctaaaaaagagccttgataaacaaaggtatcagcatacactcggagtgatgtatacagccggctgtcttgccatggcaaacggctattcaatagaaaaggcaatgcttgcaggcctgcttcatgactgtgccaagtgtctttcgactgacaagaaaatcggactctgtgtaaagaaaaatatagacataacagaggtggagatgtcaaatccgggactgttacacgcaaaggcaggcatggtgctggctgaggaagagtatggtgttaaggatacagatatattgcatgccataagagtgcatactacaggtgaagcagacatggggcttcttgataaaatactctttgtggcagattatattgagccaaacagatgtgaagcaccgaggcttgaagagataagaaagcttgctttttcagaccttgataggacggttgcagagatactgtatgatacaatcaatttccttaatacaaagagtggggcaatagatccggctacccagattacttacaattattatgctaaatatagagacaacagggaggaataactgctatgcagacaattgatttagttaaaaagatagtggaagcacttgaagacaaaaaggcagaggatatcacagttcttgacataggaggggtttcttctatagcagactactttatcatcgcaaacggaaacaatgcaaatcagctcacagcaatggaagatgccgtggatgaggctatgtatacaaacggagtgcatcagaagcaggtagagggaacaagcaactctacatggattctcatggactaccaggatattattgtgcatctgttttcaaaggaagacaggcagttttatgatctcgacagaatctggagagatggaaaagtggtggatgtacactcgctgtagcaataattctatgattaaagaattataaatagaaacaggtaatttaaaatatcgcacccatatgctgtgcttttcagcttagcatatggatgcgatattttgcaatattagaagaaacgaaatactccaaataccttgccaagtatttcgcattcaggaactatgattggatccattgtgtcgttctccggctggaggcggatgtgaccattctctttataaaaggtctttacggtagcggaatcatctataagcgctacaaccatgtctccgtttgaagcatcactctgctgctcaacgaggatattatcaccatcgaagataccggcattaatcatactttcgcccttgactttaagcataaatgactgcttatttggcatatactctgcaggtacagggaagtaggtttcgatattttcaactgcaagtatcggctcacctgcggctacacggccgaccagaggaacattaaccatctcgcggcgctgtaaaccaaagctgtcatctataatctctatagccctgtttttggcaggatcccttctgatgtagccttttcgctccagtgtctcgagatgtgcatggacgcttgatgtggactttaaatgtacaccttcgcagatatcgcgcactgatggcggatagcccctgtttaaaatctcactcttgataaactccagtatctctttctgcttgtctgaaatcttttctaatgccataggtaaatcctccgtctgattaattaaataatataatgatatgagaggtaaaaggtattttgcctctcatgtatgattataaaataaaaaatgtattttaaaaaagtatatcataaaacctatgcaaacgcaaacatatattccgaaattttgttcgctttttctattgacaaacgattgttcgagatgtattatgtaatcacgataacaacaaacacatgttcggaaatacaagaggtggttttatgagagaaaaatttttatcaggtagaagaaaaatgcttggatggactgctgttgcatttatagcagctgtcattatattgtgtggcactattcatatttttgccagctctactgccagcaggccttataacaagtattataccagcgtcagggttgaggagggtgacactgtctggagcattgccgatagatatattgctgatagtcaggtgagcaaaagagattatgtagatgaggtctgcaggctcaatagccttaccgatggcaatgtacgtagtggtgattatatagttgttgcatattattctcaggacataaagtgatgcaatcttgctaaaatttcctgtttcttatataatataggtcagatgcagcgaatcagactatatcattattgtatt

SEQ ID NO: 1505 - DNA, 5001 bp, Unknown
  gut microbiota DNA sequence
ttcttacaatttgcataaagcgtaaactgcgatatgagcaaaagctttccgtctacatcatttatcgaaagatttgtcttgtcattctcatcggcaaaaattctcatgtttataagctttttgatcattttatcagcaatctctttagtgtctgtctctgctatgcctatcaaaacgcacagtcccttttctatgctgccggttatatttccatctatagtgcactttgcatgatttacacgctgtattacaaatctcattattatgttgtctccttaaatatgttatttacatgttataaattggatataattattttgttacaatttatatgacatatagttttactaccatttttatccaacaataataatattattctaaaccacatttataaaataaacaagtctgtctgtgactttgcccacatagtttcagtcaaaatcatatgaacaccgcaatccctaaaatgtatttattaggcaatttgtattcatttataagctttcgtgtacatttatgaattatattgtcaagtgacatattactgtgttagaattataaatataaaatttttacaaaccattttttttgagtaaaggaggatatttatgaactacaatattgagggagagccattaccggttgtaatctgcaaccttgaggcaaacgagactatgattaccgaaaaaggtgccatgtcatggatgactccaaacatgaagatggagactacatcaaatggaggcatcggcaaaatgtttggccgtgcattttcaggtgagagcatgttccaaaaccgctacacatctatgggtggtccgggaatgatagcatttgcatcatgctttccaggatgcatcagaccattccagattgcaccgggacaggaaataattgctcagaaatcagcatttcttgcttcaacctccggtgttgagctgtccgtgtttttccagaaaagaataggagccggtttcttcggcggtgagggctttatcatgcagcgcctgtccggaaacggattagtatttttagagtttgacggctatataaaggaatatgagcttgcaccaggtcagcagctggtgattgataccggttatttagcagccatgacaggaagctgtcagctcgagattcagactgtccctggtatcaaaaatgccgtattcggtggtgagggattattcaacaccgttgtcaccggacctggccgtgtatggctccagagtatgccggtttcacagcttgccggtgccatcagaccttttattccaacaggcaactaaacctatgcgctgtgctatgtaaaaaacaggactgtcgatattcaggcagtcctgttttacactttgtactaaattttatggttttatattttatctatgccataccatttgccgtcttgtacttccatagcatctcagcgtgattctgctcttctatctgtatatctgccaaaagttttctgatatccgaatttccaaatacaaatacatcggaattgtactcgccggataccagcttttctgttcctatacagtctgtagccagataacagtcagccttcttgtcctcagaattgccaagcgaatcgtatgttgcagcagggttataattcttccccttagaatcattgcagtcaactgacggaacctttcccttaatcacctgatctaaagagtcaaaatgcttttgctcatctcttgcgatttcttcaaaaagctccttaagcaccggatcctttgcctgattgctgtatttggtatacttctctatgcacgcctgttcctgtgtttttaagtcctcaatagcggttgtttctttttctgttagaatcatttaatagacacctcctgtcagcattattatgtacaaaggtgaaaattatatttatgattacagtattttttgtttaataatgattctgtctgaaattagacttaaaatacataaaacaactttccatagcacatcctaacctcatacttagaatttaaataaaaataacagtaacaattcagtaataaggaggactattcatgaataatacaaggatatataataccaatccgctcaacatcagtggcatatcagacgataaaaccgactgcagccgtcaaagtgccttctgcgatggcacaaactatgcggatttaccactcggatgcgtatgcgaaggaactgaagttagaaacagtgctgacgaaaatgtcaaaatttacaatataaagcactctcatcagcctatttagccagctcccagaatgccactgcactggcagcagccacatttagtgaatccacgccatgtgacattggtatctttacagtgtagtcacaggagtctatagtctgctcatgaagaccatctccctcagtaccaagcactattgcaagtctttcctctgagtgaagcacagggtcatctatactcacggaatcatcagtcagcgccatagcacaggtcttaaatccaagcttatggagcacatcaatattgtatttataaacactgctatttcggtcgctgcaattttggtcactgctatcacacttatcatgcaatgaagcatctgaaaaagtattgtcactgccgacattgtacttgggaaaatatgcccatggcacctgaaacacagttcccatgctaaccctgattgcacgcctgtacaaaggattgctgcaggcaggagtgagcagcaccgcatccatatgcagtgctgccgctgacctgaatatagctccgacattggttggatttaccacatcctcaagcaccgcaactcttcttgcatccctgcacacctcttcgacggaccttggcttcggcctgtacatagcacagagtgtgcctctggtcaaagcaaagcctgtcagctttgtgagcaaatcaaactccgcagtatatacaggtatattctgacatctttcaataatgcctcttgcctcaccatttacatgccttgtctccatcagaagagaaaccggttcacatcctgcatcaagcgccctctctatcaccttgggactttcagcaataaacatcccctcttttgggttggctctgtttaaaagctgattctccgtcaatctggcatacacatccagattaggatccataaaatctgtaattgtgattatattgtcagacatataatcaatcctccctcagatgtactaccctggctgccgcacgacgcctgttgtcctcctgggcagcataatgcttacgtgtggtatttacatccttgtgtcccagaacatctgccacaagatagatatcacctgtttcctgataaagtgtggtgccatatgtactgcgaagcttatgaggagtaatattcttaacggttgttacgagtctcgaatacttttttaccagattctcaacagagcgtacagatatacgcttcctctgtaaggagagaaaaagcgcattagcatgcccctcggcaggtgtaattatgcttctctcctcccagtacgaaagaagtgcatcacgtacctcatcaccaaaataaacaatcacatcggcaccaccctttcggtgcaccttgattccgttgttcttgaaatccacatcatccatatcgagtcccacacactctgatacacggatgccggttccgagaagcaatgtcataagtgccaggtcacgtacctttgttttctcatggaaacgctgctgattctttgacagactatctccggactcaacctcatctagaagctgtgcgacctcatcagcatcaagacgaatgatatttttctcatgtatttttggaagagtcaccttgctcgcaggattagtgtctatatactctttcctgaaataaaaattataaaatgtgcgcagtgaagcaagctttcgcttaattcctttctcatcattggtatgtgtgacaccatccttctcataatacttgagataaaacaggtattcctcaatatcggaagggctgattttatccagtaaagatataggatagtcccttatatcatatttcttaagtgatggattggcactcttcatgtactcgaaaaaagtctgtagatcatatgcatacgcaatcttggttcttgaggacttatccgcatctattccgataaaaaaatccatacagaacttcggaagcttctgtatcatatctctgagctttaattcattttttatatttacatcttcgtagtaagctttgtctttcataataatactatataataatcaaagttgactctaaccaagtatttctttgattttctcctctatacgctccttgaccagtgcagctatatcctttgtcttcatgtccttgtactcatcatactcaataggctttaaataatgaacctgcgttgtaacagggccgaaatgaaagctgttgaacaccttatatgaatctatgagagctattggaataataggtacatgtgatttcaatgcaatcttaaagcttcctgctttaaaattctgtactttattcttattattgaacttatagcctccctccggaaacaagacatatctcttgccgtttttcacatccttagctacctcattgattatagtaagcccctgcctgggattgtctttctctaaacgctttgcctgaaccagatccacaaattccctgacaagcattgtatgagacttctgcttatccataacaaacgacagtaccctgtcatgtgtagtaataattcctaataaatcatacttcccctgatggttgggatacatgatatagccacctgcttcaggaagattctcaagaccatatgcctctgttgtaatctttcccgatttgttcatcaaatcaatgcagtgccgcatcatattatatctctcagtttccgaatacttctgcggatggtcagccatgtatctcattttaggaacaatatatggtgctctgtgaaaatttgcaaatataacaaaaaaaagttttaacatgaatatctaatctcctgttcaacaaaagcgaatacaataat

SEQ ID NO: 1506 - DNA, 2698 bp, Unknown
  gut microbiota DNA sequence
ccttgcatgaaaaccttccgacaatggtgtcatgtttgtatgctatcacctgctcaattgacttaaagacaggtctgccgccatatgtgcagataagaaacacatttttattgtctgtgagattgactgatgcaaacttaagcaccgaccgatggaacttcccgccgtatactcctgatgcaaaacctattaaatcatattccgacaggtctttctctaccgtctgtgtcgcatctatcagctcgacatcgtttgtctttgctatctcgtcaattatcttttttgtgtttccatgatgcactgatgcatatactattgctgtcttcatctgtaatgctccaatcctttattagtcttcctttgattttgccatcagcatctgctccagctttttctttccggtctcatagtctgtaaacacaattccctccataccaagctttctgccaccttcgatattctccggtctgtcatctatgaacacacattctttcggattcagattgtatttatcaaacaggcactgatagataccggcatcaggctttatcatcccaaccatagctgaaatgactttgccgtcaacaagtgacacaaaactaagttcactgtgcgtatgaagctcgaagaagtcctttggataattcgataacaaatacactttatagcctctgctctttaactccttaatccagtctgctgcatagtcgaatgcctttacgacaaaagcctttccctctttgaaaaatctcctgatatcctcctcatactgtggagccaccttaaccatctcatcaattatctcgttctcaggaattacaccacggtccagctcaacccagacagggttttcatatgttgcatgggctaaagctgctattttattttcttcaatgccaatctcacgcattgcctcgtccggctggaacctgacaagcacgtttcctatgtcaaatactatgtttttaatcataatttattttttctcctacaaccctgcatctcttcctgcaaaaagcaatgccatatgctaaaatatcgcacctgccctcatcgcgcagagcctcatcatatctcttctccttaatctgcgtcatagccgcctcacacgctacatcaaggtttttcatctcttttgcatatttcacttcaataacgatgcctgcatccggatcctccggcttaattaaaatatcactgaaaccgtctcccgactcacgatttgacttaataagccagcccggattgcttccgcgaagcaggccgaggagcagaccatgatagaagttctctttcatatcatcagaagcctttgtatcaagtatacttatcatgcggctcataacgatgttaagctgtcttgcaatctgcttctcatctttatcgaggatagctctagataaaagcttcatggtatcatcatcttttgcaacaacagccttgaaccactcctgaatctggagaacaaacacttcacgcacctctttatttggaatcaccagcttgtaggcatagctctcactgtcgggcagcctgacctcaccagccgtagtcaggtagcctgttgtaaaaagtacgctccacagattgtctatagtattgtcaatctcatcataagtcaagtcaaggcggagctgtttctcaacaaaaccacctgccacgagcttttctatctcatctctcgtggtctggtctgccttgtctacaaagcgcttcaccatgtcattgccactgctgttaatccagaatgcactcggcctggctgatgtgtcaaaaaccagcttcttagcaaaattgattacatcccacggacaataaatgtcggtattaccgaaatgatagccatcataccactcctttacatcagggtaacgctcagccctgtcataatccgtaagcagcttcctgacctcatcatcagtaaaaccaaactgttcatcatgggcgatatctacaatggaattgatttcaaaattgttgagacctgtaaaaatactctccttggatacacgaagacagcctgtgagtacggcaaactgcagaaactcattagtcttgagtgcctttccaaagagtcctctgattagtgaaaccatctctttatagtaaccattctggaatgctttatccagagggacgtcgtactcgtctatgaggataacagccttctgaccatagtgtataaacaataactgcgacagactctgcagacttgatacaagaagctgctcatccatcgtatatttaccatcacacagcgaaatgatagccctatacctgtccttatcgttttctgaaagagcctcactatgctccagaaacttaaatttttctgcttccctcccaatgagctcagtaatcatatatcttgcatcatcaaatgaacgtccttcagcactcttgagtgacagaaaaataaccgggtactttcccatatatttgtcacaaagctctttgctgcctgaaatatataagccatcaaacaatgactcatccgtgccaacctcaaaaaaactttttagcatgctcatattgagagtctttccaaaacgcctcgggcgtgtaaaaagggtgacctctccaccggtttcaaccaattgctctatgagctttgtcttgtcaatataataaaagttgttccttctgattttttcaaaactatcaattcctaccggcagttttaaagtactcaccatat

SEQ ID NO: 1507 - DNA, 62408 bp, Unknown
  gut microbiota DNA sequence
tttgaaaatatttcataagctgctgtacgttttttttataaataagtctatattcatgcattcaaaagtgttataatattagttataaaaataattttattcatatatatacgaggtagtttttaaactatggggattaaaacatttgaaacacgcgaagcattaaaaaataaattacataacagaaaacttatcttttcagaaaatgagcttgatgaagttttaatttctcataattattttaatttatttaatggcctagaaactatttttctacaaacatcctctcctaaaacatatgataaagtaaagttgattgatttcattaatctatatcaatttgataaagaaattagatcaatcttatcaaattgcttggattctgttgaagagaagttaaaagcctcaatagcatataatttttgtaagcatcattgtgtttcattatcggatacaatgcaatatacaaataagtctaattttatgaaccctgcaaacaatgaatctgggacaccgacatactgtcattattctgaagcatatccatttgttaattatcaaaatcaaaagatatatcaagattttgataagttttgtctttttaaaccattttttctatctaatttagtagatagaaatgatcatattgatatttcattttatttagacaatgattacgtagcaccttcaggggttgctgtttatcgtaatagtgatggcacttacaacagaaacatcgctgtgccattttgggttgcaatagagactcttacatttggtgaaatattaagactgttgcactatttgcaagatgatgttcttaaagacgttttaaatgattttaatttaccattatcaaaacgtgccccgttcttaaatatgattgatattttattgtgtcttagaaataactgtgcacatacgacgctacttaatagatttcggacggaaaaaagatatcgaattaatgcattattaattgcttcgttttcattaacacctaaaaatgcagattcggtgttaaaattatttgattcaattaaaatattaagcttttttactgacgtatctgcattaaagaaacctttacggacattaaaatttaaaatatatgttagtatgggaataaaaaaggggaaaacagtatataataaaatattagcacgaatgggatgcggagactataaaaaatggaatatagctttatttgaaacaaaatattttttataatttccttgacatttttataaattagtagtataatgcacacaacaaatgagatgcccttaagggcgctaagtaatggaggcattactttcgataaaaaacctagcatataatgctaggtttttttggtggtgcgttgacagatattaaattaaaaagctacggtacggcttttttatatagtaccggagactctggcaatttgcctatgaaaaaactaaaaattctgatgcatattaatatatttaacttgcataaaaaaattattatacttctaaacacgtaaaagtattgttaaaataccacaaaatagatgtgaatatcattatttgaaaaaccgtttgaacatactaatctttgtacattttcccatatttacaaatattaaattgatgtatttttgctaaatattgcagaaataagttggcatttatgtctattgaaacgtaaacgcttaatgtataaactgtaaatatagttattgcaaccgattgcgttgttgcgcatggaacagatgaaatcatgcgcggcatgcaatttgagcaggtgcatgacagtggcttaatggctttgatatttatcaatttgatagtcatttaccactgcataaaaacaaggaggaaaatatgagcaggaagagaaaaatggcatctataacaagtgccggactggtgtttgcaatgcttttaagccagagcgctgtggcggatttgggtacagagcaggttaaggcagcagagaataccgcaaagtgggtagacacggagtatgtggtgaatggagactttgagtcgtctataaatggggatggaagtataaccggttggactaagtcaacgggaagtggactatttgtcacaaaagatgagtgggcgaaaaataatacaactcagtttacaaagataaaggacataactggggacaattcgctatctcaaacaatcaagaatgttgagccgggaacctataggatttcaattgatcaggatgggcaaaaagatgttaaatcaggcctgtatgtgaaatatttggaacaggctaaagaacttccggctacaacagactgggataattgggaaacagttacaaccgatgaatttacaattgaagctgtacaagatgttgatatatgtattggaggagatgttacgaacggctattggggcgatattgacaatattaagcttcaaaagctttatgaaacaaaagcagatgatactgactcttccgaagaaaaccagaagggctacacaatctcagtaaaccagacagatgtagccgtagaaaatggtgatacagtcaatcttgaagcaaagattacttatgatggaaaagaaataagtgaacttcctgagggagtaaatttatggtggtgggttgataaatggaacgaccacatagatggattggatgacggaacattagaaaatgacaatggttccggaaaaactcttaaggcagcctacacaacaaagtcagccggtaagtattatgttgtagcccagcttaaggatgctgatggcaatgagcttggttatgtatgcacaaccattacgtcaaaggcacctgaaattgatacctcagtagacaatgacgatattgttgttgcaaaggtaaaggatttgtcctctgatttcataatgggaatggacatttcatctgttataacagaattaggcagtggtgttgtatataaggattataacggaaaagtaattgacaatgtgacagatttctgcaaattactggcagaaaacgatataaaccatatccgtgtcagagtatggaataatccatatgattcaaacggaaatggatatggtggtggaaataacgatgtggcaaccgcaaagaaaattgctgatgcatgccgcagtgccggaataaaaatgcttgttgatttccattgctcagatttctggactgatccgagtaaacagatggtgcctaaggcatggaagggctatacagttgatgagaaggctgcagctgtagaaaagtttatcaacgaatcattaaacacaattgatgcatcaaaggatgttgtagatatggttcaggttggaaatgagacaacagtcggttttataggagaaacaaaaacagatgccatgtgcaagctcttttccgcaggctcaaaaggtgttaaggattacaacagtgacgtaaaggttgtgattcatgtggaaagcccacagaagaatacacttacaaaatggtcagataaccttgaaaattataatgtaaattatgatattcttggaacaagctattatccatactggcatggaacactgagcaatttaaagaaagaactcagctatgttcagacgaagcacaacaaggatgcaatggttgtagagacaagctatgcatatacacttgatgattcggatggtcatggaaatactgttcgtgaggggaataatgatgactcggcagatgccacagagcctttcacagtgcagggacaggctacatatatcagaaacctcatcaatgctgtaaatgaggcaggcggacttggtgtgtattactgggagccggcatggattaccgtaggagatacaacaggtctttcagaggaagctgcagcggcaagatatgaagcaaataaaaagatttgggaagaaaaaggctcaggctgggcagcaagctacggcggtgagtatgatccaaaggatgccggaaaatggtatggcggttctgctgtagacaaccaggcaatgttttatccggatggaacagcaacagcaggtcttaaggtatggaagtatgtaaagaccggtgccaaggtaacgaaaattggagttgaggatatagaaacagcaaatgtcacatcagaggcaggtaaagagatagagcttccaaaaacaatcaatgtgacatacaataccgaaaaggttgaagagaacgttgtttggaatacagagggaattgatttttcaaaggcaggaacatacactgtagagggaactgtcaaattcagcagaaaaatcgagcgtggtgcttataaagataagacatccggtacaacaaaatgtacagtagttataaagcagaaaaatcttattacagatgcagatgatgcaggttttgaaaaggctgataattttactgccgataacaagattgtcgattcggtttcttctaccaaggatgataaaaagtcaggagcagcatgtgctcactggtacaatgccggcacagatgcagccgaggcagaaattacatacaagaaagctatcacacttgcttcaggagagtataccttcgagtacgcaggacagggtgccgatggagatcagctttatgccaaggctgttgattccaaaggtaatgtcattgctaagggtgacaatgtaacacttgcaggctggaaaaactggaagactccaagcgtttcgtttaagcttgataaggaaaccgaggttactcttgttgtcggtatcgtgagtgcaaaaggtggctggggaacagttgatgacctatacttatatcagacaaagtcagccgacaagagtgatgccgataatggtaataccggtgatgatgaaaataagaagccggataccccatctactgatgacaataacaaggacaatacaggaaacggtgatacagccacacagcctgcaaaggctcttacaccgggagcagttgtatcaagcacatccgacaccaaaacaactgtaaaggacactaagggaatccttccggatacagtaaaattcgagtcaaagaaggtaactgatgaaaagaaagtggcaaaggttgcagatgtagtaaagaataaaattgtaggagtaaaggatgttttaatatatgagcttaatctgacagatggcactacacagcttcatcagcttgcagacaaggttcaggtaactatggatatgccgtttgcattagctgacaatgaggcagtcaaggtgttccgtgtagattcagacaagtttatagcatgcacatcaagggtagcagatggaaagcttgtatttgagacagaccatttcagtacatttgcttttgtaaaggtaaataccaatgcaggtactaaagcagctcctgcaggcgcagcaaagacctcagatgacagcaatatgtatatgtggcttgttatcgcaatggcaggtcttggcgtatcaatcgcagctcttatgaaccgcaaaaaggagcaggcatagcagctcttctaaaagaacaacataacgcataagaaaaataaaataaaaaataaaaccgtcgtaccgggccgtaaatagcagggtacgacggttttacttatgtgctttactgattaattactttaattattcatcaaacttttcggctttatcgaagagctcataaacctcttttgaaggctcatttgtgcaaagtgtcacaacaacggctgcgataagtcctaaaacaaatcccggcagcagctcgtagattccggttgatgtgaggaatgcataccacaatatatcaacggcagcacctgttatgattcctgcaacagcacccttgaagttaaagcgcttccagaagaggctgagcatgattgcaggtccaaaggcagctccaaagataccccatgcattggaaacaagtgccatgatagagccggcattagggtttgatgcgatgatgagtgctgcaacagagattccaagaacgacaatacggccggtccacatcatctctttgtcacttgccttaccttttctgatgacaggcttgtacacatcactcgagaaagcagatgaagcagcaagaagctggctgtctgcggtactcatggaagcggcaagcactgctgagagcagtatacctgagataacaccagggaaaatctttcttacaatctggatgaaaacaagagagttttcatttatagattcgtcaaagccaaggaaaagtcttccgattactccgattaaggttgcaaaaaatacaataagcagagtccatgtgattccgatttttgctgattttttcaaatccttctgagatttgatggacatgaatctgataatgatatgtggcataccaaagtaaccaagtccccatgccagtcctgacacgatatcctgccagcttgagaatggatttaagtaaccgcccgggagtgctgacatagatgatgtatcaagcataaatgctgcaaaaattggtgctataaacatagaaccaagcacgagcatgccctgaaagaaatctgtccagcatacagccgagaagccgccgaggaaggtatagcctacgatgacaaccgctgcaagatacatggcaatctgtggatccattcctattacagtgtggaaaagagtaccgcatgcctttacgcttgatgccgcataaatagtgtatgcaaccaaaaacacaattgcacatattacctgcagtgcaagtgatttggacaggaatctgttggtcagatactgcggaatagtgattgagtcattggctacaatcgagaatttacgcagtctcggtgcttctagcagccagcttatagtgtagccgattgcaagtcccacaggaatccatacctgacctaagcccagtgcatagatagaagtaggaagtcccatgagcacccatgcactcatgtctgaggccccggctgacagtgccgcaacccatggtcccatctcacgtccaccaaggaagtaggttttttctccgccgtttctgtttttcacgaaaaagaaaataccgatacccagcatgcacagcagatagacgataaatacaataatttctgatgttttcatttgtagtacctctttaatagtttatctagtaaccatgctaccacgttagtgcgataaaggcaaggaaaaattaatgataaaacaaaacgattcatttattatttgtaattgtatagataatcagctatactataaaaaagtatagctgatttatatatgttaaaggggtgaaaacgggatgggaatatactttaatcctggaaatgagagctttttacagtcaaaaaacagtagaatatatgtggataagacagaactgatcaatgaattaaatagcagattatcgacagatgataaatgtgttgcagtaagccatgcaaggagatttggaaaatcccatgctgccggaatgatagatgcatattatagcaggggctgtgattcagcagagttgtttgaagacactaagcttgcaacaaatccggcatataaaaaacatatgaacaaatacaatgtcatacatcttgatatttcatcattttgggatgattataaggcaaatatcattgaaaaaatcaaggaatacgttgtgtcggatttaagggatgaatttgaagaaaatgttgatttctcaaagaaattcagtgttatactcatgtctgtttataagcttaccgggatacagtttgtaattattatagatgaatgggattgtgtaatcagaaatagtgatgaccagaatctgattcataattatttacagtttcttcattcattatttaagtcagaggaatcaaagtacttccttgctttggcatatataaccgggatacttccgattaaaaaaataaaggacgaatcggcattgaataattttcaggagtttacaatgcttaaatccagaccaattacacaatattatggttttacagaagaagaagtcatgatgctgtgcaggcaatacaacatggattatgagagcatgaaagcctggtacaatggctatctgatagatggtttgcatatgtataatccgaattctgtgtcgatggcacttaattacagggattttgattcttattggaaaaacacatcatcatttgagtcaatcaatacatttataaacatgaattatgagggcttgagggatgatattgtaaatatgctgtcagggaaaaaattatatgtaaacaccgaaacttttcagaatgatttttctactgtttcctcaaaggatgaagctttgacagctctgattcatttgggatatctgggatatgacagagaggaagagagtgcatttattccaaattatgaagtgaaaaaggcatatcaggcagctctgtgcacaggaaattgggggaaaattggaaaatcaattgccagatgcgatgaattgttaagggctacaattaattgtgacagtgataaagtggcagaaataattgagcttgcacatgaatcatatacatctgttttgagatataatgatgaaaactcattaagctgcgttctgacaatggcttattttacagcacctgcatattacaatattgtcagagaaatgccggcgggtaaaggatatgcagatatggtatttataccaagagaaaatgccggaaaacgcccggcaattataattgaattaaaatgtgataagactgccgaggctgcagttaaacagattaaggacaggcactatgagggagcactggcaggttataagggaaagcttcttttggttggaatcaattatgatagtcaaaatggtgaaaaaaagcatcatacctgcgtcatagaggaatatgaaaaataagcacatttccctattgacgaataccctgcgttgacatatcatagtatataagtgaaagggagtagccggcacgagagtgcttacttatccgtcagtacgattgctcatacatatcatacatatatgacagcaatccggagagtgattaaatggcgagacttttgttgttttatacagcagaagtgtcgcctttttttgtatataaaagccttctgctgataggacatagctgtaactatcaattaatcaggcatccttaaaaaggacggcagaaggaggaaaattatgatttttgtagcaattttactgcttatagcaggctttgtagcactggtgaagggcgcggatgtgtttgtggatggagcggcggcgctcgccgggaaatttggtattccgcagcttgtgattggactgacgattgtggcgatgggtacgtcgctgccggaggcggcagtcagcatcactgcaggaataaagggtaatgcggggattacagtcggcaatattgtcggcagcaatatactaaatatccttataatcctgggagtgacggcactcatcacaaatgtagccatacaaaaaactaccttcaaatacgagataccgtatatgcttcttatcacagcggtgcttctcgtgatgggaatgacaggcaatgaaatcacattcattgagggagttatactgtgggttttatttattgcatatctgctttacctgtattttctggcaaaaaagggcaatgacagtggtgatgagcagccggtaaagctatatccggtatggaaatgtctgctctttattgtgctgggcggtgtgtgtgtcgtacttggaagccagcttgtcgtaaacggtgccacaactatagcaagagcctgcggcatgagtgagcgctttattggactgacaatcgttgcattcggcacatctcttccggagcttgttacatctgtttcagcagcacgcaagggaaatgccggtatagcgattggaaatatagtcggcagcaatatttttaatatactttttgtaataggaacagttgcactcatttgtccggtaccgtttgagagcaggtttgtgattgatacagttgtggcaatactgtgcggtgtgctactgtggggcggtacgataagacataaagagcttagaaagccatgcggagtggtgatgctgctttgctatgcggcatattttgtatatctggcagctatgtaatgatgtgttttcgcaattgccatgactgtgtcaaaaaagagtgggatgaagagataaaaattaaatatagcaaactgtcaataattgtgcatacaaattagcactttaacatcaaaatgattgtgattttacaataaatataaacaattaattaaaaatagcactctaacttgacaagtgctgattgcaggtgtataacgtagtcagaacgaacggaaggaagcgattataatggataaaaacccaaagcatccattgaagaaaaagaataaggcagatgcaaagaagcatcagaagcacgtatacgaatagcagcttccgttaaggaatactatccagtaagcacaatgtaccccagcccgtcacagggttggggtattttgtgtttttggaagtattttcagagacagcccttgagaaagctgtgaatacattttcacctgcaccttttatgagagaagctttaagcttgtcgccatacatatagaggtcatttccacgcacaatgccccattccatcaggagcgctgccgcaccggtcacaaacggtgcagccatagatgtccctgtttttgaagtgtagcctccggtgtttgaacatgaaataatgtccacaccgggcgcaattatatcaggctttatgctgtcaaaggcccaggtatagcctcggccggaaaaggcagctgtgcggtttgtgcggctgtcataggctccgacagagatgacattttgtgaggtcgaggggatggtcagggtgatatcgggtgatgcattgataaatgaggtctgtgcattgcgcagagcacctgacggcagccatatatcccatgaaccgtcctttacagatatgggcacaagcgatattttccagatgccgggtgagatgtattctgctcccatgagttcaatgaatatttcctgaaagggagagtagggtgagggaccgccgcctgttatatatatgtctgtcccatcgagccggtatctgtatgtaaagccttttgcctgattggtaattgtatctggaatctccagcatatcattatttggggcggtaatttgcagctgtatctcatcccagtatttcttccataaatctatggaaagagatggctcaggatagcctatcgcaagctctgcatcggcagggtatgatctgccgtttgcatgaccaaagccggctccgtcgttacctgagccgacagagaccgcgcagcggtagttttctgctatatagtccaggtatgtttcaagcagtgaggtaccgctgtgcgagccgttacttgtgccaaagcttaggtttatggctataggcatattcatatcgatggattttcttatgcaaaagtcgactgccagcataatctgtgtggttgtgggaaagctggcaccgcctgaggttttgagttttacgattataagagtgctttcataagcaacaccgcggtattttgtgttttgttcattatcattaccatttccgtttccggcagcgattcctgccacatgagtgccgtgcccggatatgtcgatgcttgggcagatgcgctgcatttctaagctgttttctgcatttatggctttggtgattgtatcgcggtcatataaggtgccgaaagggatgatatcactgcgtgaggaatcatcggaaacagtctggtcccacagataggcgattctgcttacaccatcctgtataaaagccggatgggcatagtaaattccggagtcgataatgcctatgagcacgccttttccggtcagattatatggattggtgtgtacgggagtgatgcatgaggcctgcgagccctcgtatacatcgtagttaaactgctttggcttttccatatatatgatttcatcgcacagggcgacggtatttacaagggatttttcaattacaagcaccgcatagtttccaagtagctttgtgatgagtacagaaggatatttttcttttattttttcgatgtcaccgacatattttactatcacttcccaactgtcactctccggcagatagccgcttgaaagccctccctctttaccaagctcataaggggtggacagcagggcggcggacagctgtggagaaattttctcactaaatgctatttccatactaacctccattttttattagtaaaatattaaaaaaatcttaaaagacagatgcaatatatatttggtatgattaattcataatcaatcaattaattataagaaaccgggaggtcgaaatgagtaaaaagaaaaagattatcatttcagtgattgcagttgtgctgattatagcagttattgtgtcagctgttgtcattgcaatgacaaagggaaagaatgcaaaaaagtcatcgggggtgtatgcaaacaaggtctctgatgtcatgtatcaggcgggaagcactgacaggtacagcggtgtcgtggaagcagccgacagcatggatatcaaggctgatagtgagaaaaaagtaaaggatattctcgtgtcagagggtgatgaggtacaggtgggtacacctctttttacctatgatacaaaggatcttgctgcgaaaaaggaaagtgccacgcttgagcttgagagcttaaacaatacgctttccggctatgatgcccagatagagcagctcaacaaggaaaagaaggaagcgtcaaaggatcagcagcttgactatacactgcagattcagcaggtgcagacacagcagaagcagacacagtacgatgttgccacgaagaaggcagagatagaaaagtacgatgagagcatcaaaaatgccactgtaaatagcacaatggtcggtgttgttaagaaaatcaatgagaatcagagtgcagacacagcagattctgcatttatgacaattgttgccaccggcgattacagggtaaagggcacaatcgatgagcagagctttttaaacagcggactggcagaggggcaggcagttatcgtacgctcaagagttgatgagtcaaagacctggcagggtaccatcagcaaggttgacactgagaatcctcagactgataacagcaattcaggcatgtatgatgatggaaacagcgagcagaaggcctcaaagtacaacttctatgtgcagcttacaggcacaggcgatatgcttttaggacagcatgtatatgtggagccggattttggacagacacaggtgaaggaaggcatatggattgatgagagctacgttgtaaaggatggcgatgatgcatatgtctggacacttaataaaaaggataagcttgagaagacaaaggttgagcttggagactatgacgagaatctcatgatgtatgaaatcaaatcagggctttcaaaggatgactacatagtgtgggcatcggatgacctttatgagggtgagccggcacagacatgggaagagtacattgaaaatggcggcggtgaagacacagtctatgataatatgggtacagaagctcttgatgaccagatgcttgagggcactgagggcggtccggttgatgatggcacaatggacgaaggtgctgcagatgccaccggttcaggtgacgcggaggtacagtagatgattctagaactccagcatatttacaaaaactacgaccaggataagcttgtggtgccggttttaaaggatgtttcactccagattgaggagggagagtacgtggcaatcatggggccgtcgggctccggcaagaccactctcatgaatattgtgggatgtcttgatctgccaacatcgggcacatatatacttgacggcagacaagtcagtgagctcaaggaaaaggagcttacgagagtcagacgggatacaataggatttgtattccagaatttccagctcatgccgcgtgagagcgcactggacaatgtatgcctgccactcatatatgccggtgtgagcaaaaaggacagaaggcagatggggatggaggcattggagcgcgtagggctttcagacagagctgatttcaagccaacacagctttcaggaggacagaagcagcgagtggcgatagcgagagctatggtaaatcatccaaagcttctgcttgcggatgagcctacgggagcacttgactcaaagtcaggcaggcaggtgcttgagctctttgagagccttaatgagtccggcgtgacggttgtcatgattacacatgacagaaaggtagccgagcaggcaaagcgcatcgtccacatcatagacggcgagataacagaggaaggacaggaggcaggtaatgaaaaagaaaaagagaattaagatcattataatagctgtccttgtagttgcagttgtagcgggaagcatcacaggagtggtttattacaggaactccaaggggcttgcttccgtcatgagtgtttcaatgatcagcacgacaaacgacagcacatccatgaccagtgagggaatggtgtgtgacgatgcatgtcagacaatcaatttaaaggatggacagaaggtgacagaggtttatgtcacaaaggatcagcaggtaaaggccggagataagctccttgcatatgatgtgacgagtctttcactctcggttgagatgaagcagcttgagatacagagtcttgagaaccagcttgtatcggaaaagcagaagcttgataagctaaagaatactaagccggttgcaaagcagcctgagactcctgttacacctgagccacagcctgacacacagccggctgcacctgagcaaaagcctgatgaacagcatgatgtgatatcggatttgttagaggctaagggaagcggtacagaggacgatccttatgtatttacatgcacagaggcttcatatgtagccggatcgcttttgaatacacttgctgataagagtgcggtagcccggtttgtaataggagatgctaacgcgcctgatatggagcttatcgtaagaggagataagcttggcagctatgatgacagcgatgagataaagcttttccttgcaggttcaattacagcagtaaatgagccgtcagatgccgcagcagacaatgccacagaacaggccacacagacagaagctgataccgcagcagaagaaaagacatacacagcagatgagcttaaggatgccataaaggagcagacaagaagtgttgcagatgttgatttacaaaagagaattgcacaggctgatttaaaggaactgcagagcgagcttgaggatggcgtggtatatgcaaagaaggatggaattgtgacaacagtttgtgatcctgccaatccacctcaggacggtacaccgttcctgcagctttcaggagcctcaggactgtatatcagcggaacaatcggtgagctggatctggatacagtaaaggtagggcagagcgtatcagcagtcaactacatgacaggtgatacctatgagggcacgatatcagagataagtaatgtgccgtcagacagtgttaactactatggagatagcaatccaaactcatcattctatgagtacactgcatacattgagaatccacagaatctcaaaaagggcgattcgctgcagcttactatagatacgtcatcagagggctctgacagtggtctttatatcgacaagtcatatgtcagaacagaaaacggacagtcatatatatacaaggatgacaacggaaagctcaaaaagcagtctgtcaaaacaggcaagtcgctctggggctcatatgtggagataaagtcaggcctgacaaatgatgactatatcgcattcccgtatggagtcagagaaggcgagaaaaccaaggtgtccgaagatggtatgtattagtttagcagggaggattaaagatgcttgaaaatattagattgtcctttaggggaatctggtcacataagatgcgttcgtttctgaccatgcttggaatcatcatcggaattgcagcaattattgcgattgtttccacaattcagggcacaaacgaacagatagaaaagaaccttataggttcaggaagtaataacgtaaaggtcacactgcagaaggatggttatgatatggatctgtcatatgattcggcgccggcaggagtgacagaggtatcggctgccacacttgacagcataaaggagctcgaccatgtgcaaaatgcagcactttaccgcacaagacaggcttacaatgcagtatattatctgaacacggcgctttcaggtggcaatataacaggtgtcgatgacggatatttcgacacagcaagctatgtagtcatgaagggcagaggcttctcaaagaatgattatgcaaaggcccgcagggtggctcttatcgacgagagcgtggagagcagcctgttttcaggagagagcgcgctcggcaagacagtagagatacagggatatccgtttacagtagtcggtgtagtcacggaaaaggacagctatgacctggtaataaattcaatggatgattactatatgtatgcctatgatgacagccagggcaatgtatttgtgccaagcggcacatggcctgtcatatttcgctatgatgagccgcagaaccttctgcttaaggcagacagcaccgataccatggctacagtgggaaaggcagctgaggagatacttaacagcagcttaaatgtaacagacggctctgatgtgacctacaaggcacaggatttacaggagcaggcaaagcagatacagcagctcagccagtcaaccaacatgatgctcatatggattgccggaatatcactgctcgtcggcggtatcggtgtcatgaatatcatgcttgtgtcagttacagagcgtacctcagagataggacttaaaaaagcaatcggagcaggaaagggagcaatcctaggtcagttcctcacagaggctgttgtgctcacaagtcttggaggcttggtgggagtgcttgtcggagtgatactctcgaaggtcatttcaatgctaaatggcacgccgacagcgataagcccggcagcagctatacttgcggtgcttttttcgatggcaatcggaatcatattcggtatgcttccgtcatacaaggcagcgaacctaaacccgattgatgctctgcgccatgagtaattttattgaaacagctgctattgtgaaaaaaataacaattctttgtattttgatgaatacaagggtagaaaaattttaaaaaattttgtagaatgttcctagtagataaatactaggagcatttttttagaggaatcaggtcatgtgatatgggaagtgtcacatgatgtaatgattcttctaagtatgtaatttattaggtaacaaaatatacattattttaaggaaaaggagataatatgtacgctgacgaaaacgtaatcaaaatcaaacatgcagttttgcttgaggtcgcaaaggctgcatttgcaggtaacctcgatgcgatcagagatgacatcccatttacacttattccgggaccgacacctcagttccgttgctgtatctacaaggagagagagatcatccgtcaacgtgtcagacttgcagagggtaaagcaccaagcgcgaacgatgatggcaatatcatccaggtaatcagctcagcatgtgaggattgtccgatttcaagctacacagttactgagaactgtcagaactgtcttggcaaggcttgtatcaatgcatgtaagttcggagcaatcgaggcaggacgcctccgctcacatatcgacccacagaagtgtaaggagtgtggacgctgtgcacaggcatgtccttacaacgctattgctcatttaaagagaccatgtaagttctcttgtcctgtaaatgccattacatacaatgagtacggcatttcagtaattgatgagagcaaatgtatcagatgtggcaagtgtatccacagctgtccattcggagctatcggatcaaagacatacatcgtagatgtaatcgatgcaatcaagtcagagaacaagcatgtatacgctatggttgcacctgcagcagagggacagtttggtgtaaacatcactatgaacagctggaagaaggccatgcaggcagttggcttcaacggttttgttgaggtagcgctcggaggagatatgacagcagcatacgaggctgatgagtggcttgaggcatacgaggcaggagagaagaaggttacatcatgctgtcctggatttgtaaatatggttagaaagcactatcctgagcttgctgacaagatttctacaactgtttcaccaatgtgtgcagtatcaagaatgatcaaggcaaaggatcctgatgcagttacagtattcatcggaccatgtgttgccaagaagtcagaggtacatgatcagaagatagagggcaatgcagactatgtacttaccttcagtgagattcgtgctattatgaaggcaaagggagtacagcttgaggctgatgacacctcataccaggagggctcagtatacggtaagcgtttcgcaaactcaggcggagttacagcagctgtaatcgagagcatgaaggaaaagggagaggatgttgattgcaaggtttgcaaggcaaacggagcagcagagtgtaagaaagcacttctcctcatgaaggcaggcaagcttcctgagaacttcatcgagggaatggcatgtgaaggcggctgtgtaggcggaccaagctcatacaatgacatggtgtctacaaagaagttccgtgatgatctcttaagcagagcagatgacagaaagattcgtgacaacatcgccaactaccatatggagacatttgagatgcaccgcaaggagcagtaataaaataattgttacagcataagttttttaaaacccccggcttgtccgggggctttttgtgattgtgaatatctgcaaaaagatatgtggttagtcatattgagaattgaatagtaactaagatattaaataaattaagtacatattacgactctatcacaggttttcgggataaagaaacaattgtaacacaactgaaatatatgaagccaacattaagaaattctcaaggaatttgcagtagcaaaaaagattgtttgacgctataatagatattgcttgaaataatattatcaggtttgagtaataatatagagagaataattataaaatgctaaagaggattggaaaaatggacaaaaataaaaagatgattatcggcatacttacggctgcaatagttctggtggtggcgtttatagtgtatatcacatgctttgattcacatattgagttcagcagcaagttcaaaaacggtattactgttgagtatggcaaaaagtttgaggtaccaaaaatcaaggcatatgtcagaggcaggcttataaaccgaaagggaaaagagataaaatgcactatagacagtaatgtcgatgcgacaaagacaggttcatacgagataaaggtaactgctcaatacggtaaaaaaactgcgacacagacaatcaaggttgaagtgagggataagaaggctccggagattacattaaatggcgatgcagagatgactttagaggcaggcagcgagttcagtgacccgggatatacggcaacagacaactatgatggggatctgacagacaaggtatctgtcacaggagctgtcgatacatcaaagccgggagactatgagataaagtacagtgtcgcagattcgtcaaagaatgagagcgaggtcaaaaggactgtgcatgtcacagataccactgcaccgcagataaagctttcgggtgatgattttatgtcagttaaaaagggtgataagtacagtgatccgggatacacggcaacagacaattgtgacggagacattacagacagtgtcaaggtatcaggagataaggtagataaggataaggcaggaaagtatactgtgacctatgaggtctcagattcatcaggaaataaggctaaagctacaagagtggtaagtgtgtatgatccggctgccacggcagacacggtaaatccgggcaacaagattatttatctgacctttgacgatggtcccggaaagtatacacaggggctattagatgtgcttgataaatacaatgtaaaggccaccttctttgttacaaatacacatcctgactatcagaacatgatagcagaggaggcaaagagaggacatacagtggctatccactctgccagccacaaatacaaccagatatatacaagtgagcaggcattttttgatgaccttgagcagatgaacagtatcataaaggcacagacaggaaatgatgcgtcaatcatcagattcccgggaggctcatcaaatactgtgagcaaggattactgtccgggcattatgacacagctcgtaaatgatgtgacagcaagaggccttttatactgtgactggaatgtatcgagcggagatgcaaacagtaagccaatcagcacggaacaggtagtgcagaatgtcatttcaggagtgcagagccacaacgtatcagttgtattgcagcacgacataaaggatttcagtgtcaatgcggtcgagcagatcatacagtggggacaggcgaatggttacacatttttaccactcaccacaagctcaccgatgtctcatcatcgtgtaaacaactaaaatcattcaaataaaaaagcgcaaaaaagaagagttcgaaatgaactcttcttttttaatcatgattcttatatcttattccccaattaacatttttgtaactataattttacctaaatatataataaagaaaaaggtacatagaaactagattgcctgagtggtcaaaattatttaactacctcaacgttaactgcctgtggacctttagcgccatcagtgatatcgaactctactgctgcaccttcctcgagagttttgaagccctccatgttaagtcctgagaaatgtacgaatacatcctttccgtcctcggctgtgatgaatccgtaacctttttggttattgaaccattttactgtacctttgctcatcgaaagtacctccaaataataataatgctgcttacgcaactaacgttagaatagcataacgggtttaagatgtaaagcaataaagtcaaagttctttaaagtttatgtcattatttgctaaaaatttcattacaagcttatcccattcactgtctaaggtcttatccgctgaaaaaatattgtaggatattccggttgtcagagtcagaagctggctctgatacctgatatttatgaaaaaaccactgatatcggacacggtgaaagcagagtgcagactgcttagggtgtgctccatattttcaggtgaaagcagaaagacaaacttgaatgacgatggagtctgtcggccctttatcaggtcaaagcagtttgtgcgaagcatcctaaaggggagtatgctatagcccgctataccattttcctcaagctctgtggagctgtaaaagcccttttgcaggtgaccatctatgacgtatgaggctgcctttgtgatgacggcctcctggagcaggaagttgtcaaagatttccgtgcgaagcagcttgttcataaagtcctttgtgtctgtcagttcaattgatatcataatttctcctcattttccacattgtatgtgacagcgaatgattgttctaagtggttttgaatagttatcgattattatatcatacatcagatttgcggattatgccataaaaatagatataaaaatagccttaaaaataaagcctgttcaactggaataattgtaaagtccgtggtagaataaatgcgttatgcaataaaaacaggaggcaatccatgaaacaggaaaaattatttgatttactaaaagcggctgtttcaccatgcgagtgtgtgaaggctgcaaagcaggagcttttggaaaacggatttgaggagatagattatacaggtaactggaagcttgtgcgcggtggcaggtatgtcttaaatcatcatgatacgaccatgtttgcgtttactgtaggaagcggctacaacaaaaaggatatggtgcgaatagcggcagctcacacagactatccatatcttcgcataaagccaaatccggattttatgacaaactcatatgcacaggtcaatgtagaggtgtatggaggaccgattttaaacacatggtttgacagacctctcggagtggcagggcgcgtggctataaagagtgaggatgtgttcaatccgcgtatggtgctatataggtctaaaaagcctgtcatgattattccaaatcttgccatccatatgaacagggatgtgaataagggagtcgagataaataatcaggtggatctgatgccggtgcttgattcaatacctgaggatgaaatgaccacggattatttccttagttttctggctagagagctgtctgtggaaaagagcgatatcatagactttgagctcaatacattttgtgtggaggagccttgctttgtcggtgtgaatgacaccatgatttcatcaccgagaatcgacaaccagtcatcctgcagggctcttcttgatgcgatagaggatggaaacagagctgatggaataaacatcatagcgctttttgaccatgaggagattggaagtaacagtaagcagggcgctgcctctataatgcttcacgatatgctcaggcgtattttaagaaatatggacctttcagaaaatgaaatagatgagagcatatatgatgccatgcttttgtctgttgatgtggctcatgcgcttcatcctaataaaaaggaaaagatggatatcacaaataagcctgtcatgggtaaaggcttttgtatcaagcaggcgtgttcgcagtcgtatgctacggatgcacaggctatcgccattctctgtcagctgtgtgatgaaaagggcataccttaccagcgttttgtgaatcgttcggacagccgtggcggcagcacactgggctcgattgcaggtacgcttctgccggtaaagactgtggatataggtatacctattcttgcaatgcactcagcctgtgagcttatgggagtacgcgacatgaaagccttaagcgactgtgtgacggcctttttcgggtaccattaaagggcagataaccattatgggaaaataaatacagaaacctcttgcataagtttagttttcgtgttaatatgacgtagtaatgaaaactacttgttacggaatgaaataacttttaaaaaagtaatttaaacttttattatcatatagtgcaggaggaatagatatgtataagattataatagatagctgtggtgagctcacagatagccttaagaaggatggacatttttgcaatgtggcactcgagcttgatgttgacggatacagaatccgcgatgatgagagctttgaccagcatgatttcttaagaagagtaaaggagagtgtaaagggaccaaagtcgtcatgcccgtctcctgaggaatatatgcaggcctttgagggagaggctgaccatgtatatgttgtcacactttcgggcaagctcagcggctcatacaacagcgctgttttagcagtcaatctgtacaacgaggagcatgaggactgtggcaagcaaatctatgtattcaattcccgctcagcatctataggcgagacactaatcggcatgaaggtacaggagtttgaagagagtggactttcatttgatgaggttgtaaagcagaccgaggagtatatttcttccatgaataccttctttgtgcttgagacacttgatacattaagaaaggcaggacgattaagcaacctgaaggcttttgtggccagcactttaaatataaagcctgtcatgggctcaaccgatgagggttcaatccagcagcttggccaggccagaggcattaagagggcacttgccaagatggtagaggatgttgtggctgccacaaaggactgtgagcacaggattcttgcaatttcacactgcaactgcccggagcgtgcacagtatgtgaaggcatgccttgagaagcttgccagatttaagaagattgtcattgtggatactgccggcatctcaagcatgtatgcaaatgacggaggcattattatagcagtataaggatatggtctttattttatcggccggatatattataatgatggcatgggaaatttagattacacacaggttttaaacaaaatagaaaacacacgccgtttcggcaatgagccgggagtggtggtgacagcacaggtcataaaggtgctgagagaaaaaggaaagcaaaagcgcataataccgtatatccatgtggcaggcaccaatggaaagggctcggtgtgcgcttttttttctagtatattaaaaaaagagcatatgagggcaggcacgtttgtatcaccgcatctggtagattttgaggagcgcatcacggttgatgggcgtatgatagctaaggaggatgtcacacggcttggaaactatctgcttgatatagattttggcataggacttacgatgtttgactactgccttgccatggctcttttgtactttgaggagcagcagtgcgattatatggtcattgagacagggctcggaggcagacttgactcaacaaatgcaatcggcacaccgcaatgtgccgttattacaaagataggctatgaccatatggctatccttggcagtgatatagcggatatagcggctgagaaggccggtatcataaaggaaaacagcacagtggtggtggaacagcaggataaacgtgccatgcaggtgattgagcaggaagcgcaaaaaaagcatgcacggataattactgtggagcaaagcgatatagcacgctgcagcggctacgcactgaggctttgtggcacatttcagtgggagaatgctgcagcggcagagcttgcggcgcggtatgtgctgggaaagcactatagcgggccggaatacgaaattcaatatgataagacagggccaaagagcgagaaaacaaacctgaatgacaggataaagagtgcacttgaagaggctgtgtggccgggacgcatggagatagtatcaaaggagccgtttctgctggtggacggagcacacaacagcaatggagttgatgcacttagggagagcctcatgcagatgtatccgggtgagaaattttgctttttcatgggagtcatggctgataaggactacgatgccatgatacgtgagattttacctcttgctgaggagttttatacagtgacaccggattcagacagggcactgcaggcatcgcaccttgctgattttatcagaaaagagggagttgaggcaacagagctttcaggagttgatgagataagaaagcacctgaaaagagatacgaaaaatgttgcatttggctcattgtattttattggggagcttaaacagcaccggatataaacaccggatataagaggatgattcatggctgatattttaagaatttttaaaagagatatgtgcggcatattccgaaatgtgcttgtactcattatagtgataggactgtgcgtgctgccggcgctgtatgcatggtttaatatctatgccaactgggatccgtatggcaacaccggaaatatagcaattgcagtagtcaatctggacaagggctggacgaagaatgacagcgaaactgtaaatatgggcgatggtgtggtagagtcattaaagcaaaaggatactataggctggaaatttgttaaatcagaggaaaaggctgttgagggtgttaagtcaggcagatattattctgcacttgtcatagatgagcagtttacctacagcatgtatcatggtgtagctgacaatattgaaaatccaaggattacctactatctcaacgacaagaaaaatgctgttgcgacaaagataacggacagtgcagcaagtgctgttaaatcaagtattaataagcagtttataaaggtgcttgcagagcaggtatttaaggagaccaacgtaatatccgatgacatgaaggaaaaggatgctgtggggcagatgaccggtaagcttgaagcggtatctgagagtcttgcgcagtacgatgccatgatagatacgtttattgacggaaataaggcattatcacaggtgtctaaagaaacgggcgaagcactcaaagatggacaggataagcttgcaaagggcacagacaggcttgaagagagtaaaaatgatctgcagtccaccagacaatccttcgacagctttagcgcagatatcacgtcggcattagcaaaggtgaagagctcgattgatgatatatcaaagcagatttcagatgcaaatctgtcgcaggatgtaaatactattcaaagtgatgtgcaaaatattaaacagtcagcggatgctttgaaaggtaatattgacactcttgaggacaaaatcaacaaaataaagccggatatggacgatacccatgtcggcacacttatttccaatatagagcttgtcaaggaacagacaaagagcatgatagaaagcacacagtctgtggatttatcggggaagacacagaattctgcagaaacacttaagagtgtaatgtcggctctttcatcgaccgcgtcagcagtgaatgatacatatacctcacagatagtgccacaggtggacggcatgataagcagtatgtcgtctgttcttgattcaatgcagaccacacttggcaatcttagtcagacatcaggctccatggcgcaggtgtttgacggagtggacagtacgcttgatacactcaatatgagcatgacacagcttaagggagtcatagagtcagcatctgacaagataaatacgacactcgacaagcttgaagcagcctctgaggatgaaaaagctgatatcatagtgaatctactttcggggaatcctgaaaagcttggcagcttcttttcagagccggtgcaggtatcagataattacatctacgagatagccaattatggctccggggtagcacctttttacaccacacttgccatatgggtgggcatgactatacttgtttcactggtaaaggttcacgcggatgccaaggggcttgggaaactaaagccttcacagctttattttggcagatatctgacattctttttactgtcacaggtacagacctttatcattgtgctgggtgatttatacctgcttaaaatacagtgtgtgcatccggtgtcatttattgtgacaggcgcagtgacaagccttacattttcactgctcatatattctctgaccatatcctttggtgatataggaaaggcactggcggtggttgtcatggtactccagattgcaggaagcggcggcacatatccgatagaggcgctgccggcatttttcagggcagtgtatattttcttcccattcccatatgcgataaatgcgatgagggagtgtataggaggtatgtacgaaaacatactcggaaaatgttatatcacgcttttactttttggcgcagcctctttggtgataggacttgtgatacgaaagccgtttatcagactcaatcattttatagagaagcgtatggaagatactgagatgctatagttaaatgtacaattaataaatcaataattggcatattaatatggtacttctgatgtgccgtaagctataaagcgggaaggaaagtatgcaggatacaggtagaaacaataataaagattccaatatggataatgatatgaataacaatgcaaataataatgtgaatgagcagccactatccgatgataagagactgcgcgagatgtacaataagctggtcggatatgaaaaaaccatccacgagcagaatcaaaagcggataaaaataggattaagatgcatatacatcattccactcttttttcttgtgctgctgatgattgtgccggacagttcaaaactcatttttcttgtgctgtggatagtgagtctgtttgctatcgcagtgtatttaatcggagttgagtatgtggactataagctgcaggagaagatgaatgagataagcggcagggatgcgcagtgtatgagcgtgagtcctgtcgtgcagattgatgacagggtgcaggaaatagccgaaagagtggagcagagatttgatacgatgcagcaaagcaaaggggaggatgccgagcaatgaaaaaaatatttcaaatatatctggctgacctgaaacgcatatccacaaatgtggttgccatagtcattattatgggactctgtatcatcccggctttgtacgcatggtttaatattatgtccaactgggatccttacggagagaaagctacatcacagatgcacatagcagtatattctgaggatgaggggatgagcgtcggtgatttaaagctatgtatgggagacagtgtcataaagggactgaagcaaaatgatgcaattggctggatttttacagatagcagtaaagaggcactggagtatgtttatagtggaaagtgctatgcagcctttattgtgccgaaggatttttcagctgctatgcttagcttcttaagcggtgagctggtcaatccgcagatagaatactatgaaaacagcaagaaaaatgccatagcaacaaagataacctcaaaggtcaagaccacggtgcagcagtctgtaaactcttcaatggtaagtacgattacggagatagcgtcaaagtcgggagagctcatagtgggagacggcaaatcaggcgataacctggccggaacggttgttgacaagctaaaggatatggatacgactctttctacatatgcaggcatgctcgatacatttgccatgctcacggattcagcagacagcctgataggctcgacacagtcactgcttccgagtgtgcaggggctgattgacgggggacagtcatcggtaagcggcatgcagtcatcggtgctctcgggagcgcagactgcacaaaccatcacacagatggtcgacataagcttatcaaacataaacagccagcttaatgtgctggaaaactctatacagctcttaaatgcatcgggagtagctgatgccgatactgcggacatatctgtttccgtgtccggctttgatacggtagaacagcttgcagagaatacgctttccgccattcaaggcttaaatggagtggatagttcacagatagaggctgtcagaaataatatccaaagcattaaaacacagataaaagaccttaagtctgatactgaattgacggcagataagctaaagcttcttaaggaatcaataaaagcggatgtgtcaagtgccaagtctgcaatagatacacttaaaaatacatttgaccacagcgtgtcaccgaatctcacaggagcggtatatgatatagaatatgcacttattgagacacagtccatgcttggttctctggacaacagcttcccggatatacaaaaagcactcgatgattattcaacagtacttaaatcaggaaatgcagatatcgtaaataccagacagtatgtacagcagatcagagatggtttgaagaatgttatatcaggatttgataatttatcaaatgatgagcagtttaatgagattgtaaagctgcttcagacagatccgacactgattgcgcagtttgtgacatcaccgttgtctatggatgagcagaagatatatgagatatccacatatggctcagccatggcaccgttttacacagtgctggctctgtgggtgggaggtcttataactgttgcacttgtgaaaacaaaggtaaaggacactgacgatataaaatcacttggcaaagtaaacagcgtacataagttttttggcagatatatcacattttttgtgataggccagcttcagacacttgtgacagtgctcggtgatttgttctttgtcggaatacagtgcaggcatccgttccttttctggtgtgcaagcgcactgacaagctttgtattcacgcttcttatgtactcactcacagcagccttgggcaatgtgggacaggctgtagcagtagtcattatggtcattcaggtggcaggcgcaggtggcacattcccggttgaggtgctgccacaggtgtacagagcactgtataagttcatgccgtttaactatgccatgaatgccctaagagagtgcgtgggaggcatgtaccgctttgattattgcaaggatcttgcgattcttcttatatttatagcaatatcgcttgtgatcggactgttgcttggacgtccgtttggaaagcttaataccgctattgaaaaaagtaagaaaaagtcaggccttatcttatagtaaaaaaagctatatagaaacttaagttatggttattataaaaaaatagtactagacattttttttctattgtactagaatgagcataaatgatagtagacccgatatatgataacgctaggttatatcggatccgtaaagaaacggaggatataaagatggaaaagaaggatatcgattggtcaaaccttagttttggctaccaggaaacagattacagctatgtttctaattataaagatggaaagtgggacgatggacagctcacaaaggatcatacagtgacacttaatgagtgtgcgggagtattccagtatgcacagacatgcttcgagggacttaaggcatacacaacagaggatggcagaattgtctgcttcagacctgacttaaacgcacagcgtcttaaggattcatgtgagagacttgagatgcctgtattcccggaggatagatttgtaaaggcagttgaggaagtagtaaaggcaaatgctgcatgggttccaccatacggctcaggtgctacactctatatcagaccatacattatgggaacaaatgcagtaatcggtgttaagccggctgatgagtatcagttcagaatccttgtaacacctgtaggaccatacttcaagggtggcgcaaagccaatcacaatccgtgtatcagactttgatagagcagcacctcacggaacaggacatatcaaggcaggactcaactatgcaatgagtcttcatgccattgtagatgcacatgcacagggctttgcagagaatatgtacctcgatcctgcaacacgtacaaaggtagaggagacaggtggtgcaaacttcatctttatcacaaaggatggcacatttgttacacctaaatcagacagcatcctgccatcaatcacacgccgttcactgatggtagttgcagagaagtacttaggactcaaggttgagcacagagaggtgctctttgatgaggtaaaggattttgctgagtgtggactttgcggaacagcagcagtaatctcaccggtaggaaagattgtagaccacggcaaggaaatctgcttcccaagcggtatggatgagatgggacctgtcacaaagaagcttcgtgacacacttacaggcattcagatgggccatattgatggaccggatggatgggttcacgagattaagtgtgattaataataagaatatacatttataataaagcaccgggtattatgttacgtcgtaatatctggtgcttttgtattattttatgtggcataacaagacgatttgtgctaatatactcttatatgtatgcaaatgtttataaaagcttggaatagatatataaaagcaaacaaaagagataaccggggataattaaatggacgagtatgaaaagataagacagagaaagcgcgaagaatatagaaagagacaccgcgcccaggttagaagaaagcagcttattggcaatggcattgttataggcatgataatacttataattgcaacgataatcattgtgggagctttaaggggcaaaaaggcaaagcaggaagaagtaaaggcagaggtgaccagtactctttacaatcctatacagccaaagcttgatgtacagttgctgacacccaatccgtattccagaccacagaaggcacttgagaaggtaaacggcatagttgtccattatacagcaaatccgggtacgtcagccagacaaaacagagactatttcaatggcctggcagagaccaaaaagaccaaagcaagctcacactttgttataggattagagggtgagatagtgcagtgcataccttgcaatgagatatcgtatgcatctaataacagaaacagtgacacaatatcgatagagtgctgtatagaggatgagacaggaaagttcaacgacagcacataccagtcgctcatagagctcaccacatggcttatggggcggtatgatctgagtgctgatgatgtaataaggcactacgatgtgacaggcaagaagtgtccgctatatttcgtggagcatgaggatgcgtgggagcagtttcacaaggatctggatacatacatcgaagaaaatggtgtgccaaaggaagaggcaagccaaaactgacaatatacaataaattaaaggatgatttaaaaaatgaaggaaattatcggaaatctgttaaaaaaagagaatgtacgtcagaatctgagcagcctcagacaggagattaaagatgaaaatgcattagcagaggctctaaagctgcttgcaggagaagatgagctgcttgtgtcgtttatgggagcagaagatgcaaaaaccagaaagaacgcagcgcttctgataggagatcttcatatgtcacagctttctgatgaggtttttaaagcatacgaggctgaacagatgcgctttgtaaagggctcatatctggcggcgctgtcacagctggactgcaaagagctcttgccacagcttatggaacgtgcaaaagagcttgagcatatgacggtcacagctgaaaataggaagcatattgaggaagaattaaacgagataaataaaatcctgattaaatataatgggataaagcaccatacacctgtgctcgagggagtaaaggctgagctgcttctgatgacaaaccgccttcacagagaggtggtacgacgtcagataccggttaaggatacaaagctgcatccgcttggagtgcttgtaaagactgacaatatacctcttatcatgcaggtgcgcacattcagaaaaatgtactttaccatacatgcagcatcgcttctgccaaaggatgcacagaaagcagccggacttcttgcagagtcagatatgtatgatatattaagacgcatgcacctagagggtggtccgttttactatcgtattgagagcacggcagatgcggcgtaccagagcaggcttgcgaaagctatcgatatgcattttgcgggcaggatgatcaattcgccaaatgattacgacgtggtgattaagctcataccgacaaaaaatgacaattattttgtctgcatgagattatgttctatacaggataatagatttgcatacagaaagaatgtgcttcctacgtcgatgcatccgtcacaagcggcacttattgtttcacttgcaaagccgtatcttaaggaaacggcacaaatcatggatccgttctgcggagttggtacactgcttatagagcgcgcacatttagttccggcacgcgagatatatgctacagatacctatggagatgcaatcactatgggcagagagaatgctgcgtttgccaaaacaagaattaattttatacacagggatttctttgatttcagacatgactacaaatttgatgagctgattacggatatgccggttcgtaaccgacagaccaaggcggagatggagcttttttacgagaggtttttcgacaaggccgcagagcatctggtatccggcggaatcatagtcatgtattcaaatgagattgggtttgtgaagaaacaaatcaggctgcgtgtcgaataccgtctgcttcaggagacatgtattctcgataagaatgacttttatttgtttgttatcagatatgaggattgatttgcgtgagtttttaggaggaaaatatgtcagattccaagctttttcaaaaaatacaggattatttctgcatggtcaacggaatatatttgtcgtgtctgacaaaaaaggatggagtcatgacagaggtgtgtcaatgtaacgataaatggaagagtatgcttacctttattggtgaggaaaaatacgaaaaccttcttttgagactgtcggactgcagggttgagaatctcatagatgaacctctggataaggactatatcaggctgtatggtctgattgtaagagtggacaatacccacgatatatattggattatagctgcggtaattgatgagcagatgtctaatgatgagagaaacctgcttcctgatggcataattattaccagtgaagcgcgtcttaacagaacaattgagttcctggaaactatgaccagacagcttttgatcacaaagagagatgaggatgctgcgaatgaggcactttcgcttatcaggaagtcagatgaggaaatcaagaaacagtttcatatgcttgaggctatcaattctgttataaaactgcttgagatggatggaagttttactgatatggctcaaaaagcactggagagtgcagttactaccataaagcttaccggtgcttttatcatccgcaaaaacgtggacggcatgcatttggatgtgattgtaagctatggcagaaagccgtttgatacaatatcaattaccgaggtgccttttttcaccggaaagccttacattatatcatcagactctgtgatgccggagaaattccgccttttcatggagaagcaggctatgagggcagctatattccagcctgtaaatatagataacaggactcagatgtatgtgtgcttttttgatgagaaggatgacagaagctgggaaaaatatgatgtgaagtttttaaatgatacgaagcgcgtcattcaaagtattctcacaaaaaagataacaaccaactcgcttgcaggctcctatgcttcgctcgaagcgatactggaaaactccggctgcggtatatacgtggctgatatgtctaagtcagagatactttacatgaataattactgtaagcagctgctttcaaatattatcgaacagaacaagctggaaaaatatattttttcccatactgcagagagccggagctttacagaggtctacgtgacggaggaggacaagtggtttgatattcatcgcacaggcatagcgtgggtggatggccgcaaggtgcagcttgttacaatgtatgatatcacacagaagaagcgttatcagcagcgcattgagaaccaggccaataatgatttcctgacagggctatataacaggatgagatgtgagcaggatctggctaagtttatagatgattcagtgaaaaacgacaccagaggtgcgatgatttatatagatctggatgatttcaagcatataaatgacgggcttggccatcagtacggagatgtgcttttaaaagctatatcgcacagcctgacacaggtgaagggaattgagaaccactgctacaggatgggtggcgatgagtttatcatcatagtgacaggcagctctgttgacaggctggagagtatcattaatgatatacagcagatatttgtcagaccgtggttcttgaagggagaggactattactgtacaataagtgccggagtagcatttttcccgacagatgcaagcactgtggaggatgtcataagaagagctgatatagctcttttcaatgctaagaaagaaggaaaaaaccgtatagagttctacaacgagagtattgatggcacaagcacaaagcgtcttgacctggaaaagcacatgagaaaagccacaatgaatgagtgcgatgagttcaccgtgtactttcagccgattataaacgtgaagggggaggatgtctgtgcaggtgcagaggctcttgtcagatggaattcagcaaccatgggctttataaatccggttgactttataccgcttgctgagtatcttgggcttataaacccaatcggggagcatgtattaagagaggcagcgaagcactgcaggtactggaatgacatgggacatccggactacaaggtcaacgtaaatctgtctgtggtgcagctgctgcagaatgacatagttaagaaaatcaaaggcataattgatgaggtgggcatagaaccgggaaatctgtgtcttgaggtgacagagagtctggcaatcaatgacatggtgcgtatgaagcggatactcagtgagataaaggcgcttggtgttaaggttgcactggatgattttggtacaggatattcatcactcaaccatatcagggagatgcctcttgatatcattaaaatagataaatgcttcattgagcatcttggggaggatgatttttctgatgcatttgttaagatggttacagagcttgccaacacaataggagtacatgtctgcgtggagggagttgagactgacaggcaatatgctataattaagaagatgggaatatattacatacaagggtatttcttcgataagccaatgtgcatagaaagctttgaggagaaatatatctgacgaagaagatgtaacatgcacgaagaagatatagaaaaaagcccatgctattcattttggatataccaatctcggcacaggtggtatctgtagctgatgtatatgatgccctgacaagcaatcgtgtgtacaagagagcgttttcacatgaaaaggcaatgcagatgattctggatggagagtgcggacagttcaatcctgttctcctacagtgtctggtcaatatacaggaccggataaaggcggggctggactagcttaaatgcataataaatgaaaatatatgtaaaaatagaaattaagtgttgacatatttggtttgatttgatattatatcaaagtcgcatgagacaagcgacagaaaatcaaatatatgcggaagtgtcggaactggcagacgagcaagactaaggatcttgtgattattgcaatcgtgtgggttcaagtcccatcttccgcattataaaattaaaaagggttaagccttagggcttagccctttttgattttagaagcggaagcggaccttgtccccatgggtccaaggtctccgctccgcttcggtcgttgcagaacagacgtccaccggacgtcttgcaacccatcttccgcatggcttcggttgttgcgtggcaggcgcccgtgggttcaaggtctcgcctctgcactccatcttccgcgttaaaatgggggaagctaaattatacggatttcgtttaaaattgcatattagatcagaaggagaggacaagcttatgagtcagaaaaaatacagtttattatacccggatacaaatgcacaataccggaccttgagtgatatgactatgcatgatctggggatggatcaaatctgcaaaaagctgtcagcaaaggagcgggagcagaactacatccaaaacgtgatggcgcgtttgtatgcagatccggcggtgacacagtaccgctgcgatattttcgaggatatccttcaacagaaaaaaatgcgtgatgaccttatggaaatactcgagcgcatcagctttctgagggagtacggtagctttaaccgggaatatgatgagagtgcctgtatctgggatcttttgcatcggctggacgagcttaatgattatatcaagtgtgtggatgcgcttcatacatgtctggcagcttcggacattcattccgcaggctttctgggtttaaaagcttatgtggagaaaatctatgcggacaacggatttgcggaactgaaaaaagatatctcagaactgaaaatggacacttcacagcttaagagcattacggtaggtattaacttgaatgaccgctttgaagcggacggaatcggtctgatatctgtaaacagcaaatattttaccaagtccggaatcctgggcaatttttatgaccatattgcgtcaaaggatcggatcaatgaggataccatatggaaaaagaattttaaatttcagccgtttgatgtgaatgcagacgcggtgattagcactcctatgcagaaagtgatggatacagctgttatacggtcggaaagccggggtggcattgtgaagcttcccgagggagatcaggcaaaggatgtgactcgttatacagaccgaatcgtcaaccatatgatttcccatatggtgaaaagagtcagagaagtactgaacaaatatgtttctattaccattaccgacatgacagacttgattccggagctgctctactatatcaaatgggcggagtacatccaaaaattgcaggaacagggatttacctttgctaaagcttctgtatataaagagggagaaaatgaatctgatccgtatatgatgcaggcacgtggaatttacaatttaaagcttgctgtttttgagacagaggagtccgggaatattgtaccgaatgatatggatttcgaccggaataggagagtgtatatcttaacaggtgccaaccgaggtggaaagacgacaattacacaggctgttgggcagttgtttgtgttggcgcagggtggcatatatattccgggaaaagcatttacattttcccctgttacaggtatttacacccatttcccggcagatgaggacaagacattggatttaggaaggcttggggaagaatgtaagcgttttaaggcaatctatgaggaggctgacagcaggagtctgcttttgatgaatgaatcattttctaccacttcgtttgaagagggatactatattgccaaggacagtgtcagggcaattttacataagggaatgaggaccatttataatacacatatgcataagctggcatttgatgtggaggaaatgaatgaagagcagcagaaggcagagcacacagatggaaaagcgttttccatgatcgtgcacatgaaggggacagagcgctcctatcagattgaagtggcgcctccggaaggaaaatcttatgcaagcgagattgcacagaagtatggggttacttatgagatgctggttaattcaaacttgcaaggttgagcccctttggccattatatttagttggaaatgagaaacagaatgagaagaatagtagcagctacagaagaaaataaagaagaaattttaaaattgtataagatacagctaggcagggagttttgtccatgggacgattcttatccgggaatgaaggagattgagtttgatcttggtagagaatctttgtttgtaatgattgatgggcaggagattaatacggatgccggaagcaaagaggacagaattatcgcagcgatttcaattgatgatgatccacaggtggagaggcttgattgctggagccataaactggcacccagggctgagctttcaagacttgcggttcatccggattttcagaatcagaaaattgcgagacaaatgttggtatttgggatggaagagctcgcaaggagaggatacaaaagtgtgcattttttagtcaacaagctcaatgtgaaggctctgcgctcgtatgcagtgtttggatttgatacagtgggtgaatgcagcctgtttgggcagccgtttttgtgctatgaaaagagcctgtaaaaaaatatgattttttgaaaaaagtgcttgcatttttgaaaacaatctgatattatatacgagtcgcgtgagacaagcggcgaaaataaaatacatgcggaagtgtcggaactggcagacgagcaagactaaggatcttgtgattattgcaatcgtgtgggttcaagtcccatcttccgcattataaaactaaaaagggttaagccttagggcttagccctttttaattttagaagcggaagcggaccttgtccccatgggtccaaggtctccgctccgcttcggtcgttgcagaacagacgtcccccggacgtcttgcggtctccgctccgcttcggtcggcgcagagcagacatcccccggatgtcttgcgccccatcttccgcaaggcttcggttgttgcggggcaggcgcccatggttcaaggtctcgcctccggctcggtcggctcgtggcatgaggtcccccggacctcactcggtctccgctccgctccggtcgttgcggggcaggctctctataatgataagacaggaaaggaaatatttttatgattagatttaataacgattacaaccgcggtgcatttgattgcattttgaaggcactggcggatacaaatacaaccagctatccgggatatggtgaggatgagtggtgcgataaggctgagcagattattaaggggcttattggcagagatgattccatgattaaatttattccgggtgcgacacaggccaattatgttgtggttgcggcggcgctttcaccggtgcagagcgtgattgcagcggatacgggacatatcaattgccacgaggctgcttctattgagaatacaggtcataagattcttgcgcttcccaacacggatggtaaaatcagtgctgcgcagattgaggcgtgtgccgcagagtattatgacaatgcaaagcctgagtatctgacggagccaaagatggtttatatttcatttccgactgagcagggtactctttacacgaaaagagagctttgcgatatcagtgctgtctgcaagaaatacggcatgtacctgtttgtggatggtgcgagaatgggctatggactgggctcggataaaaatgaccttacactttgtgattttgccatgctttcggatgttttttatatcggtggcacaaagtgtggtgcgctctttggcgaagcgctggttataaatgctgaggatatcaagtatcgatttaaggcttatatgaagcaaaacggtgcagtgcttgcaaagggctggctgatgggcttacagtttgccactatgcttgagaatggcgattattttgaaaagacaaagcgtgctgatgagcttgccatgcagattaaagaggcatttgaacagaaaaaggtaccgttttgggttgagagctttacaaatcagcagtttgtgattttatcggatgagcagaagaagacacttgccgagaagtactattttgaagagatggaaagagagaaggagggcactgtagtgcgattctgcaccagctgggccacaaaacaggaggaggttgatgcactggttttagatatatcaaagctggtgtagtaacagatttatagtttttcgtacatttcgtatagttttttaaatttatgcttgcattattctaaactttttggtagaataatgcttgttcgcaggagtggcggaattggcagacgcgcaggcttcaggtgcctgtggtagcaatatcgtgtgggttcaagtcccatctcctgcattaacagggaagtcggtgaacggcttcctattttattttgtgcagataattttgaaagcctattggctattaatggtctgtaaccgttgcctgccacactgaggggtacagctgtcacaggaatttgattattatattggagatgggattgcagcgtgaagagattgaatctatcttatattaatgtaatatgtatgtttgttttgtcctttgctgttatggagtatgtaaatcttttgattggcagagtgggcggatttcctgtgcttgcaggggcgcttgtgtcatattccgttatgagatatggcagctttgcaaggaaaaatatggcatgctacatgggcatctatatactgacatggtttatcggcacggtagtgctctttatctcaaaatactcaggttggggaaatatcaaaaagcttggtccggcgcagtatttcaaggcactgtacggctcaaccctgtcagagatatggggatatttttttgcaattgtgctcatgctgacagtgattgtttcactttttccgcttaccgtaataaaaagcaggaaaatatatgcacggtatgtgttgggaaatgtgcttttttggacgataatactcataccgcttaggtttatagataagaaatttgtcaatcacaaggtgatgtggcaggccggctgtatgatggcctttgctgtgcttttgcttgtgctggagcttttcgttgtatacagactggtgaaatacaggtattgcgatgagcatgcagacaggaaagtgcgcattcacagacgcagggttcgaaggaaaacattaaaagctgtaatagtcattgtgccggtcgttgtcattgcaattattgttgtttacacatatttcatgtcgccttcaaacgagccggctgagtatgaaaaggtcgcaagctgtatcacaaatgatgacaggcttgggcctatggtttatgacagtcaggtgtatattccgataaccatagagcttgactatgcagggactggcagtccgcttggctatattgtatacaaggatcaggactatagcagcaggtactatgaggttgcagcatcaaacctcttatatatgaataagaacggtgacgatacatatttacagatggcgggcaacgcatcaaattcatacaagaagctgtctgtagttgaaaaaagcaattcatggaaggactgcagcgtttttctcatgtgggatgaggagtggcagtcagagtcgcgctacagcaaggatgtcacaggctatacggagtgcgatgaggatttcataaaaagtcttgaggatacctttggtgcagtgaaaataaatccggcagacttcaagggctatgatgcctattttacaatagagggttacaaatccatgaaggatgccatagagagtgacagtcatgtgggcacctgggtgggctgcatactggcaaaagacgataaattttactatggcagctacgacaatgaaatcacaggcggacagcttcagatgctgcgccatgtgctcggcggtaattgatatagcatttaattttgccgaaagaaaattaaagtaaaaagaaataaaaaaaggatttttaaaaatcacgtcgaataataactagtgtagagcataattagtgtagagcactattagtggaatgtaacgctatttgttacatttgtgtgtgaatagcagcagaacataacgactgtgacagcggggaggcagataaatgactattcgcgagcagatagaaaaacgtgagcaggaaatacttagtccgttcgcatgcctgagcatcaactcaagaggcagggactatgatgagccgcagtgcgatatcaggcctgtttttcagcgggacagggaccggatactgcatagcaaggcattcaggcgtctgaaaaataagacacaggtgtttcttacgccaaagggcgaccattaccgcacacgtatgtcgcatacgcttgaggtgtcgcagaatgccaggacaatagccaaggcactgagactgaatgaggatctggtggaggctatagcgctgggacacgacctggggcatacgccgtttggacatgcgggtgagcgcatcctcaatgagatatacgagggtggctttaagcataatgagcagagtgtgcgtatagtggagaagctcgaaaaggacggagcaggactcaatctgacatgggaggtcagagatggtatgctaaatcaccagacctcgctcatgccacacaccttagagggcaaaatagtcaggctttcagacaagatagcctacataaattcagactttgatgatgcaatccgcgcacagcttctgtgcgaggatgatataccgcttgagataagaaacacgcttggacacagcaccaaggccaggctcaatcatatggtgcacaatatcatcacaaacagcatgggaaaggacgatatatgcatgtcaaaagagtccgcgcaggcaatgcaggatttgcggaaattcatgttcgcaaacctctataacaatccagtcgcaaaaagcgaggagaaaaaggccaaggcgatgctcaagcagctttacttctattatatggagcatatagaggagctgccgcagaaatacctcgccatgctagggcagggggatgacaaggggcgcatcatatgcgactatatatcaggcatgacagaccagtatgccaccacgaagttccacgagtatttcgtaccggtagcctgggaaatcgatggttactgagattatttataattctgtaaaaaacgcgctcgccgggagacaacaaagatgaacagtaaggggatgataaaatgccgtactactctgatgagcttatagaggaggtacgttcgcgaaatgacatagtcgatgttataggaagctacgtgcatcttcagaaaaagggaagtacctattttggattatgcccattccataatgaaaagacgggatccttttccgtctcaccgaataagcagatgtactattgcttcggctgtggagccggaggcaatgtatttacatttctcatgcagtatgagaactttaccttccctgaggccatgcaggagcttgcagaccgtgtgggaattgagcttcccaagcaggagatgacctcagcacaaaggagggaagcagacaggcgcacgcagctgcttgagataaataaagaggctgcaaagtatttttatatgctgcttcgtggaccgagaggacaaagggcgcatgagtatttcaaaaagagagagctgtccgatgagacaatgcagaagttcgggcttggttactcggaccagtacagtgatgatctgtacaagtatctgcgcagcaagggctatgatgatgagatacttaaggagacaggtcttgtgacgatagatgaggtcagaggcgggcacgataagttctggaatcgtgcgatgtttccgattatggatgtgcacaaccgcgtcataggctttggaggccgagtgatgggggacggagagccaaagtatttaaactctccggagacaaagatatttgataagagtcgtaatctttacggacttaatatagcaaggagcacgaggaagaaccagctccttttgtgtgagggctacatggatgtcatagcactgcatcaggcgggctttgacaatgcggtggcgtcgcttggcacggcgctcacgagcggacatgcctcactattaaagagatacaccaatgaggtgtatctgacatatgacagtgatggcgccggggtaaaggcagcgctgcgtgcgattccgatactcaaggaggtaggcatcacaacaaaggtcattaacatgcggccgtacaaggacccggatgagtttatcaaggcgcttggcgcacaggagtatgaggagcgtatcaaaaaggctgaaaacagctttatgtttcagatacggatcatgcaggcaggctatgatatggatgatcccgagtcaaaaaccgcattttataatgaaatcgcaaagaagctgcttggttttaccgaggagcttgagcggacaaactatacgcaggcagtgtccagagagtacagcataccatacgacgacttaagaaagctcgtaaacagtatggcaatgaagggcggtatcgtaaagccccagacaaagcttaaaagtggaatcaatgagaaaaataaaaaggaggatggcatgaagcagtcgcagaagcttctcctcacatggctcatagaggataattcactttttgacaggataaaggggcgtatcagtgcagatgactttaccgaagagctgtaccacaaggtggctaaggaggttttttcacagtacgagaccacgcatacagtaaatccggccaggatagtaagcatgtttaccgatgaggacgaacagcgcgaggtggcagggcttttcaatgccacaatccatcaggtggagggcaaaaatgacaaggcaaccgcactcagggaaaccgttgtccgtatcaagcaaaacagcatagactaccgttcaaagcatctggcacctacagatatggagggcatgatgaggattattgaggataagcgtgcactcgaagaattgcaaaaaataccagaataaagaggaaaataaaatggcaaagaaaaaggaacaaaaagacatggcacaggagcaggagcagaaactgaatttccagcagaagcttattgagattcttgagcttggaaaaaagaaaaagaatatgctcgaatatcaggaaattgcagattttttcaaggacttaaatctggatccggagaagtttgagatggtaattgattatctcgagcaaaacggcatagatgtgcttaaaatcagcaatgatgatgacgtggatgatgatatcatactcgatgatgaggacgaggtagaggttgaaaagattgatctctcagtaccggagggagtcagcgtcgaggatcctgtccgtatgtatcttaaggaaataggtaaggtacctcttctctcagcagatgaggagattgagctcgcccagaatatggaggacggagcggtagcaaccgagaagattaatgtactaaagggccgccttgatggtgcatcggaagaggaaaaggctgagataaaggaagaaataaagacactgcagagggatgtggacaagggagcagatgccaaaaagcgtcttgcagaagcaaacctgcgtcttgttgtcagcatcgcaaagagatatgtgggaagaggaatgcttttccttgacctgattcaggagggaaacttaggtcttatcaaggcagttgagaagttcgactacaagaagggctacaaattctctacatatgccacatggtggattcgccaggctatcacaagagccatagctgatcaggccagaacaatccgtattcctgtgcatatggttgagacaatcaacaagctcatacgtgtgtcaagacagctccttcaggagcttggcagagagccttcaccggaggaaattgccaaggagatgaacatgccggtagagcgtgtgcgtgagatactcaagatatcacaggagcctgtttcacttgagactccaatcggtgaggaggaggattcacatcttggtgatttcatcaaggatgataatgtaccggttcctgctgatgcggcagcattcacactccttaaggagcagcttgaggaggtgcttggcactcttacagagagagagcagaaggtactcacactccgctttggcttagaggacggcagagccagaacacttgaagaagtaggtaaggagttcaacgtcactcgtgagcgtatccgccagattgaggcaaaggcgctaagaaagcttcgtcatccaagcagaagtagaaagcttaaggactacttagagtaagatgattaggctatccagaagaatgaaggcagtggcatcaatggtcacggccggctacacgctgtgtgatgtgggaaccgaccatggctatgtgcctattgccctggtgcagggtaatataataccgaaagcaattgctgttgatataaataagggaccgcttgagcgcgccaatgagcatataagggcaaacggtctgacagagcagattaccacaaggctttccaatgggcttgaagcgatacacgatggagaggttgactctattgtcatagcaggaatgggaggagagcttgttattcacattttaaccgcaggggagacggtgtgcaggtcggcaaaggagctgattctgcaaccacagtcggaagtgagcaaagtccgtgaatatgtaaggaacacaggctataagatagttgatgaggatatgattttggaggacggaaaatactatccgatgttcagatgtgtgccgtgtgcggacaattccgcatgggacaatatggacgagacgacggttactgtatgcgatttgtacggaccggtacttatcaaaaacggtaatccggtgcttcggaagttccttgtcagggaacaccacaagctggctgccatcatgcagcagctaaggacacaggagatgagtgattccatcatggacagaatcgagcagataaacgagatgatggcatacaatgaggcagcatattcgactatgggggcaataagaaatgcaggaatatagtgtgaaggtgaccttgccggatggacaggtcatggcagtgacagcatcagaaagtgatactttagaagccgtagcagacagattcaaggattattatgaggatgacataatccttggaattgtaaacggcaggcttcgtgaactgaataagaaaataaaaagtgactgtgagcttagctttgtgacgacagctgacagggatggcaggcgtacatacagaagaagtgttgtgctgcttttgcagagggctatatacgatgtatatggcagcatgacacagcttcatgtgatgcattcgctcggagaaggctattattgtcagcttgagaaagcagtggagtgtgcggacagccaacaggaaaaatataatgaagatacagaccaaggcagcagagaaaacagtgagaaaagcgtgacagagcacgatatcgacatgatagtatgcagcatgtactcatttgtggaaaaagatctcccaatcaccaagcacagtgcaaaaacacagtatgcggagcagcttttcaaggaaaaagggctgcatgataaggagaggttattgcactacaggagaagctccagagtcaatctctatgagctggatggtgtggtggattatttctacggatttatggcaccatcgacaggcatgctcaaatactttgatatagtgccgtatgagagtggatttgtgcttcttttcccgggtgcccacagcaggagcgttgagccgcttgtgacatcaaataagctgtttcacacgctggatgattccagggaatggagcaagatgcttggaataggcacgataggctcactaaatgatgcgattgcagccggcaggggacaggaaatcatgctgcttcaggaggcactgatggagcagaagataggaaatcttgcagcgcagattgcttcggatgacaaaaagaaatttgtcatgatagcaggtccttcatcatcaggcaagacatcgtttgccaacagactgtcaatccagcttatcgcaaagggcagaaagccacatccgttaagtctggatgactactatgtggacagggagctttgcccgaagaatccggacggaagctttgattttgagtgccttgaatctattgatgtgaagctgttcaatgaggatatgaacaggcttcttaaaggagaggctgttgatatgccttccttcaatttcaagacaggaaagagagagtaccgcggaagaaagctgacgctgggagctgatgatatacttgtcatagaaggaatccacggcctaaatgacaggctttcacagcttatcccgcctgagcacaagttcaaaatctatatctcagcgcttacacagctcaatattgacgaacacaatcctctttccaccacagatgaaagacttatacgccggattgtgcgtgatgcgcgtacacgaggtaccaatgccacggagaccatcgctatgtggccgtctgtcagaaagggtgaaagggagaatatctttcctttccaggaacaggcggatgtgatgttcaactctgcacttgtgtatgagcttgcggtactcaaggtgtatgcggagccgttgctttttggcatagaaagagactgcccggagtatctcgaggcaaagaggctgcttaagctcttagactacttgcttccgatgccggctgacggcataccaaacaattcactgcttcgtgagtttgtaggaggaagctgctttaatgtttaaaactaaaaaaaaccgtattccggctgtatataaaatactgcttgtggcaattgcagtcatggctattggcggtattgccgtaaattgttatgtgggaaattattatcgggcagattcaattgcggaggctgcaattgattcagacagagaggttgctgttaccatagaaaagaaggacaagcgtatacaggccacccagtacgatttaaggcataagaattatacgataacctttgcaccgcaggataaggaaaaagccacaaaggcattgattttttatccgggaggcagggtgcagtatacggcgtatgcgccgctgatgcatgagcttgcaaagaataatttcgtgtgcatacttgtacatatgccgggcaacctcgcagtattggaccagaatgcagcagacggtatcattgaaaaatacaaggaaatatacccatccatacaggaatggtacattggaggccactccttaggcggagccatggctgcagaatatgtgtcaaagcatgtagatgagtttgacggattatatctttttgcagcatattcgaccgctgacctgtcggattcagatctgagggtttttagcgtgtacggttcagaggatggtgtgcttgatatggacaaataccgcaaataccgctcaaacctgccggaggatacatatgagtatgtcattgatggcgggtgccattcttattttggaagctatggtctgcaaaagggagacggtacacctgatgtggctttcgaggagcagatagagatggcggtagactttattacatacaacagcaaataatagctaccggtagactgcatcatataaaatagcaataatagttacaggaaaataacaaaatgcaactgagatatctcagttgcatttttaatggtgcaccttgcggcgcacgttactaataagttattttacgaaacgccaataggctttagattattaaaatacgcaggacgataagccgggttatgtcgttgagtgatcatctatctaggacgcctgttgccagacgcctcaagcgacctacctaaagctggcgggccacgtcaaagctttgtttcggtcttgcttcggatggggtttacatgtgccctccctgttaccagtgaggcggtagtctcttacactgccattccacccttaccacaaatgtggcggtatatttctgttgcactgtccttagagtttcctccaccggccgttaaccggcatcctgccctatgaagcccggactttcctcacctgcggtctttcgacacctgcagccgcgatcacctgtcctgcatatttatttaatataccaagcatttttccaaaaatcaagcccttttaccaactttaataaacgaaatataaaatgtttcttaaaagacgataggtctattgacggtttttatcttcaatattatcttaataatgtaaagagcgatttaaaacctcaaattcttagcgtggacacagaaaattagcggatttcgaggtgtagtcagattacgggaatgcgtagcatgtagtaatattataggaaaatatagggcgaggcggtaattatgagagaaaaatttatcagatttatgaatggaagaaacgggatggacgagcttgcaagggctgagtcatgggtagtaatgatattacttttggtttcaatatttacaaggtcggcgatacttgatatactggctataggactgatgatacatatgtattttcgcgtattttcgaggaatgtaaacaagcgctatgcagagaatcagaagtttttaaatgccaggtatgagtggaccgtaaaggctgagcgcaggaaaaagcgctttgcacagaggaagcagtacaagttcttcaagtgccctatgtgcaagcaggaggtcagggtgccaagaggacatggcaagatctgtattacctgtccgaagtgccgggagcagttcgtgagacgcagctagtatgtcaatatatatacctgtacataagagcatggagaagagaaatgtttggatatataactgtcaataaggacacattgtccgaggaaaataaaaaaatatatcaaagctattattgcgggctgtgccagacaatgaagtcgcagtatggcaggcgtgcacagatggcactaaactatgacatgacttttctcatagtgcttctgaccggcttgtatgagccggatagtgtgacgcgggatggatttgtatgcagcgtgcaccctacgaagaagcgtacacttcgcaccaatgagattacagagtatgctgcagccatgaacatactgcttgcatactacaatctgatagatgactggaaggacgataaaagcctgacgaagaagacatacgcagagatgctgaaaaaggactttgagaaggcaaaaaaaagctatccgatacaggcaaaggcaatagaggactacattgcaaggcttgcagagtgcgagaagagcaatgataccaatattgatgcagttgcggggctgacgggagagatgctcggcatactttttgcgtggaagcaggatgagtggcagaaggatttgaaggaatttggctgctatatgggcaaatttatttatataatggatgcgtatgaggatataggggatgatgtgaaaaagaagtcatataatccacttatacagctcatgcattgctgcaataatgatcaggaaaaatttgacaaatcctgtcggcttatgatgacatctatgctttcagaggcagcaaaaatatttgagaggttgccaattctcttacatgcggatataatcagaaatgttctatactccggtgtgtggagcaagtatgagtatattcagatgaagaaaaggaagaaacataaatgatagatccatatcaggtgctcggtgtcagccgcagtgcaagtgacgatgaaataaaaaaggcctacaggaacttaagcagaaaatatcatcctgatgccaatatcaataatcctaacaaggatcaggctgaggagaagtttaagcaggtgcagcaggcatatgaccagataatgaaggaaaagcagtccggtgctgccggagccggtggatatggtggtgcgggaagcagcagctcatacggcggcagctcctatggtggagcatatggtagtggaccgggagcaggtgatccatttggagcaggtggaccgtttggtggtttctatggccgctatacctacaataatgcaggtagcagtgcacaggatgacaatcccaaggtgcgtgcagcaggcaatttcatcagcaacggctactacaatgaggcactgaaggtgcttgaggaggtaccttttgctgagagacgcggaaggtggtactactacagtgctgtcgcaaaccaaaagctcggcaacacggcgacagccatagaacacatacagcgggcagtgtcgcttgagccaaacaacatgcagtaccgccagtttatgcagataattgaaaatggtggctcgtggtattcggatatgggagacatatacggacgccctagtggcaggggcagcgagtgctgcagtctgctagccacattcctttgctggcagatgttctgctgctagtatatattttaataactgtactaatgataacagcctacgactcaatgagacatgggctgttatttgatatagctttttaaagttgaaaaaggtactggattgttatataatagtactaaatatataggttgcatcgacattatattggttagtttagggggcaaaaatggagaagttgaatatactgatcctggatagcaacaataaggacaggcaggagctaaggaaaataatcgagagcacagactctgattttatatacgagataatggaagtggcaaatccacaaaaagccgcacaattgcttagtgagcgcagaatagatatcatgcttacggagatttttgacagcatagagaccgggacagatatcatagggtatgccagagaaaaaggtgttaatcctcatatacatatagtgattgtaagcagacagcgtgattttgagagcgcccgaatggcgatagagcatggagtggagctgtatatcttaaagccggctacaccgatggagattgcatcgtgcatggcacagatgatttgtgagatacatgatagcagaaaaaatgaagaacaaaaaaaacagatgacattttttatgtgtggatttttgctgtcgcaatatattgcaacaggaaacaggctgtatatggatgagcttatgagattcacacaaataaatgatttaaactctgcccaacatgtgagtaatatcatgcttttgtgggtagacagtgcattttggaaggaaaattccgataaagtcattgatagaataaaggagagctttgcttcaagggcagatgctgtcagtctgggcggcaactatgtgctcatcctgctttggaagaatcattacagcaagtcaagctatatggctgagggcatatactatatgcttacagaggtgtatggtcagcaatgctatcttgctgttggcgcaggtataaatgatatctatgagatacacgactgctgtcagaggctggaaaagcttatggaaaacagattttttgctgacaacaatggcatctactacgaggatgatgagcttgtcgaacgtgacgaatctgagagagtggagtgtataaacaggctgcttatgtacatcagaaagagggatatcgagcttgtcagaagagagtatgggcacttgaagcacatgatgtttcagaacaaatcggactccgagacatttgtgaagtttgtttttgcagagattgcgcttgagctgtacaatgcagctcatggaagtttctatggaatgggtaagaaacaggtcgagaagatttttgaggcagattctctaaatgagttatataatatcatagaagaaaacatctgtatttatgaggaacatatcgctacagatgacaagcagatccgaaaggatgtagcactggtcaagagctatatcaaggcgcatctgtcagagaagataaacctggagagccttgcagatatggtctttctttcaccggggtatttgagccttattttcaaacagtctacaggggatacagtcagtcattacattatctcccagcgtatagatgaggcaaagagactgcttgagagcaccaatatgaaggttaaccagatttgtgagaaggtaggcattgataatgtatcgtattttggacagcagtttaagatgttttgtggaatgagtccaagcgagtatagaaagcgcaaaaaattcgggggtggggtagaaacggattaacatatgaagcagtctttgggcgggagcacggaggctgctttctctttggctggcagtgggttggggcaaaaaaacgcaaaaaaagaaaaaatttgatgacaaagcaccacctctatgctacaatcaattcaaagcattatatttctgtaagcggcaccacataacaattttttacaggtgcacaccactttgaagagggcagaccacttcgcatcattctacaaaggacatggaagttttcgatgctttatttaccaatcaacagcaggaaaattgaaatgccgtatgtagacagaatgcagaaagtgcagtcgaaacagataaatgcagtcaaaaaaggcagcagaaatatacagcgcgttaatcataatgtaaatataaaaaagaacagcacatgtatatttcataaactgtaccactgtaccctcattggcaccaaattttcctgctcacacaagagaacaggaggagaaggattgagcgcaaaggactcaatggcaaaggaatactttgcagacaatgccaggtttgcggatctgtgcaacaatgtactgtatggaggaagagaggtcatcctgccggaaaaccttaaggaaagggataccacagaggtgctgaccgcactagggcttgacaaaaagaccatagcgatgcagaagatgagggacatcttcaaaaatgccagcatcaaatataccggcaaatcatatgtcgtactgataggggtagagaatcagtcggatatacactatgccatcccggtaaaaaacatgttctatgatgtgatggcatatggaaatcaggtaaaggaaacagccaaaaagcaccgcaaggaaaaggatacggcaacatcggatgaatttctctcgggatttacgaaagaggataagctgataccagtgattacgattacagtatatcttggaacaaaggaatgggatgggccaagaaggctgtcggatatgtttggtgaagtagacgaggaacttctgccatttataccggattacaggattaatctgctggcaccgagggagataaccgactttacaagattcagaacctcaatcaggcagcttttcgaggtattgaagaatgcgtatgataaagaaaagatgcaggaagtgctgcagaatgacgagaagtttagcaaggtggacagagagacggtcgaggcaatcaacctgtttgcaggaacggatatagacatagatgagaaagaagaggtgattgatatgtgtaaggcgtgggaagaacagaaaaatgaaggcagagaattaggagaaagacaaaagataatttctcagattgtaaaaaagctgcaaaaggacaagagcgtggcagagatagcggatgacctggaagaaaaagaggaggttattgctccaatttatgaggcagctttatcaatgaagccggattatgacgttgagaaaatctatgagcttcttgagaaaaataagaagctggcatagcagttacagttgaaagttaaaataatcaaaagtaagcagtctttgggtgagaacccagaggctgcttactttttgctggcaatagggtgggaatttatcccatgggataaagccccttacgctatggcagaatgtaaatagagagacaaaaatctacaaaaagtaccaaaattaggaataaaataccgtttgaataaagaaatttttaagataaaaatgaaatgatatgaaaatagtgatacaaatgtgaaaatatttatatttacgaaaagtctctaaagtatataattatatatatcgaaaatagtataagagtagaatcgtatggagagttgatgatgagggtaatgagaaaaatactcaaaagaaaagtcagcattgtgatggcagtgcttgttatattgggaatagcagtttatggggtaagtgcgtttgcggaggagcagactgctaccgcggaaacttttacggtaaatccgaattatatatatttaaatcctgcaggtatgaatttaggcagtgttgattggacaagtagtagcgctgatatcaggctgaatgtaactggctggaaagatatacatcaaggtacatatgatccaaagagcggatattggtattgggatgcgacaaattgggaaataaaagatgtaaatacatattttttcacttacggcactgattggagtgtaataaaaagtaagtcatattacagaacagaagtatcaagtgatattcttgcaacaggtaaggtatatgcacaaaatggtactgcatctcagcaaattgatagtcaaaatgtatacgcattaaaagaatacacatcaaatgcaggtcgaagtttagcgtttgtgaatatgacagcaggtgagctaagcggagtacaggcacagtttagcttagatagcaattatgatgactttacaagtgatcagttaacggcactacaattgtctgatggtaaagtaacagttccgaatgatgtgaatggaaaagcatatcaatatgtgagatttattgatgctcaaaacaacgctattacggattcctttgacatatcaacagcaattagcaaaggtggcatcctgtactacggaatcagacaggattcgagtaaaacatactcagagtggagtcaggaaaagaagagtgaaacaacgcctaatgtaacaaagctatattttaataatctttcattctggacaagcgatgatataacaatccagattggcagtggagagccggtaaaagttgtgcctgatgacaccgcaaccaacactttgagctataatatatccggaactatagataaggatacgattatttctataacaaaaaatggtgttacatacaggttctatcctaatggaactgataatttaatcacatacagcggatcgaatatatgtataaagggaacatatcaggccagctcgccaaatacagtgtattttgatgcaacattatctaaattatcatatgctggtgatgtggctgacaattcccttcctttaaaagatgccggcattagttatcatgcatggaatactgaaactgattttacggatggagacctgacaaagcttgaagatttctcagatggaacacatacctggtcagatgtttatcaggctcagcttgataaaaagtatagcaatattttgttttatagtagtacagatggtaatataccgagtacgccgactgctaacaaaacagatgacttaactattcctgatggtttgacaaatccttgcttctatgcagatacaagtgatgacagtatatataaaccaaccaaccgctccggctactggggagaactatatacagttagaaatgccgaaggaaaaacaaaggatggtggcagtactgcaacgtctgacacgattgtggacataccgcagggaactcttaccaggaatagcaatatgctctatgtcaatacaacattgtatgactattattccgattatgagctgaatggatacaatagagatgcctattcgtataagactgatttaaatagccttggcaataatccaatactacactatatatatcagcctttcagacagctggatcaggcactaagctcatattacaataaaaacaatgcttcatcaccaatatattggggtaatttccaaaattatacgggaagccactatgaacaaattaaaggctctttgaatttgtatggaagcaatgattggaataagtttatatatgagaacaattccatgtggggcagaaacggtgttgtacttttagatggaaatagtgcagtgcaggggcttgtagctgatacgctatccaataacagcctgatgataaagacctcaggtaaaacagttgcagcaccatattttaatgaggatttcctgacaggaaacaattcaaagaacacagtgctcggtaaggtgtacaaggatgtaacatttccgtttgttaagaaaccagttacaagcacttcttacgaaggaagcgtggattactggtattttaacagtgctgatgctacagctgaaaataagaatctgcaactgcagcaaagtaaagaagatggatattttctgaatccttcagaccaggctgtaaagggtcaaacggctagtaaaaattatcctgcaacaggcgataataattattttccttttaatacaagtgcgcagtcaggaaacgctaccaagctcaattatggctttggacaaaaatttgatttgaaattcaaattgacatcagatggaaccgttaagacaacagaaaatgcggatgcgcctatcgagttcaacttctccggagatgatgacgtatgggtatttattgatggtaagctggtgcttgatgtaggtggaggacatggtaaggttaccggaacaattaattttaaagataaaacagcgacagtatcgagtgtgaagaatgatgctacaggtggtggggtgactccgtcaaaggtgaatagttttgctcgtgatgaaacgattacgaaggattacttcaccaaagaacacaccctcaccatgttctacatggagcgaggcctctgggagtcaaatatgtctatatcattcaacttcccggacgagaacgaattccaggtggagaagaatgtggatacaaatgacgtgaataaagatatattcccggacacattgtttgacaatacgtctgtattcccatttactatacagaatcaggctacacattttggcattaaaaaagcaactgcaggacagtcaattgaaacgagagtatttaatgacacatttgaaagcaataaggtgcaaaatgtatctggaaatacttttgaaaaagtagctggtatggatggacaaacaaatgtagtacattggttggcacagcttgataatgtgggcggttcatacaaagagcaaagatggggaagcattttacctgctggaagtgatagctttgatgtaacgtatactgcaggcagtgcaaaggatcattataaatatctgcagtttaagttttactatgattataaagataatccgagtacacagtttatgtatatcggactcgaggattcagacggaaaacaggctgggaattatttgacaaatgatgtagccactgcaaatagttcacttacaaacaggaagtggataactgtaaatgtggaaattgacaagcttattggaagtagtcaaattgatttatcaaaaataaagtatatcaggtttaactatgactacagtagaaatttctatttggatgattttaagtttattccttcgtctgaggtgacaaatccaacaggctttgttacaaagcagtatgagatagctgattatggctcagttgagagcggcaccttgatgtatccggaaaatgccgtatatactatatcatcggataaatcatctaccacgaatatcctgggtgatgatggcgtgtttgtactggcaaatggcgagactgcaacgttcacagaccagttcagacgaggcagttacatagctgtaagtgaggatgtggatacagaggtttttgagccatcgtggacaatgtatgaaaatggtgagccggttactgctgtaaataaagcaggaactacggttgatttatcttctgggactaccaacctgacaaatcaaaccggcagtacaataaaggatggtagaaaggaaaaatataaaaaaggaacagaagatggtcagcaaataaataatgatggccttgatatttcaaatgcaagaagtggtggaaaaacgataggatatcctggaacaaattctgtggagggttcatcagcctgggcaaagaagaatggcaatgtaaatacttacgatgaaaatacgattgtatttagatcatatagtgatcctgacaattctacgacatccaccaggttaaaggtcaaatacacaaataaagtaaagacaggaacaattactattcaaaaacaacaggctgctgtatcagatgatctaaaaggtacatatacttttaaagtgaaatttttcaatgtggcaggtatgggtctggaaggaactaaaacgattgagaagacatacactattgagaagaatacaagcggaacatttgacccaatagtcatctcaggtattcctgcaggaacacagtatacaatatcagagataagcgctactgatggtgcagtgcttgaaagtgtggatgtctcaagtggcaatggactggaagaaaaatacaaaccaactgtcacatataatgaagaaaccaaacttactgaagtgtcaggtactgtaaaggctgatgctgctgaacaaacgaagtttatttttactaataaactgaatccggttgtaaacattgatcttactaagaaatgggaaaatgtcagtggtgttacaatgcctgattcaataaatatacagcttcaaagacgtgtaaatgatagcgatccgtgggctgcagtggaatatgcaacaccggggcagaccacagccaactatattactttgaaaaaagatccatataatccggataagactgaatggacattttcatttaccggactggacagatatgcaaatgatactgatggaaaagtagataaaaataagccatataagtatcgaatagtagaagtgacagtagctgatggttctgtaaaagttatcgaaaataatgaatatctgaatgacttgtttaaggttacatataccgatgctatatcggtgccaagtacagaggctggaagttcaattacaaagaattacacgataaccaatacatacagtccgctgaccaacatcaagataacaaaggttgatgctacggatacaactaagaggctaaatggtgttgaatttaagcttgaaagattggtgccggatagtacatcaacaggtggggagagctttaaattagatcctaaatttgctgctataactgttactacaggtgggacagatagtagtgttggaactgcacagggaatagcagagtttaaagacttaaaagatggaacataccgtctgacagagacaaaagctgtacaaggctacaatttattaaaggatccaataaccattaaaatatataggaacaacgtaacaacagtagatggacagtcatatgacttcaccaaagcaacagataagaatacgatagagcttcaaatcagcaatcgtatcaagttccttctaccaaaaaccggtggttatggagcaatgttattcatattatgcggaatggcgctcgcaacgctaggctgcttgatatttttcttgattactcttagaaaggaggtacaatactccagacttaagagacaaagaagaaacgcgattggcaagtaacacctgtcggtcgcacgtaacgcgacaacaatgaaaaagatataagagaggaaaaaagcatgaaaaaaattaaaaaaatgttggctggtctccttggcgctgccatggtgctgacatcattcggcacaccgacttgggcatcaccggatagaccggtgaaaaccactgcaacaatt

SEQ ID NO: 1508 - DNA, 14165 bp, Unknown
  gut microbiota DNA sequence
atcaatcaaccaaccatttgtaataatacttgttattatgccattatctactaatcttttcgcaataatatgccagtcactacgtgtcgtaggttcccctccagataatgtaataacttttaatcccaaatcttttaattggtcacacacctcaagagcttctgatgtattcaactcatcgggtagcgcttctgcacaacttgaaccgcaatgtttacaacgcatattacaacccattgttatttcccatacagctgtagttaatttattcatatattctctcctataatcctttttaaataaaaaagacctactctatatttctttttacatagagcaagtcttttctacaaactacattctcacacctgttccgtacataactggtccaaataagttcttagaggtttttaattcagaaatctctacaaactccaagctcaattcttcaagattaaacatttttatccacctcccatttattgaatttatcttaagaatatatctcttattttcaaatgtcaagttattttcattattttttccaaatttcgagttcaaattctcgttttatttgtaacatattttccattttctacgcatacatcagatctcttaaccacttataaatgtccgtaaaattgcaaaagcaactggaatcagtgctacaaccttatattcaatcattcaaaaagattccaatattcgatttgattttgctttaagacttgcaaacgaattgcaaattgatgtgaatgagatatgttctgccagtccattttctgacacaattaaggaagaagagatttatcctacacttccagacggtttgaacggagccttagacgcaagtcgtgtaaagacttacttaaaaaattctatgtatccgttgatgtatctttttggcaaaaatagtatgcctgatgtagataatctacttacatcattctatcagcttgatgatgaagccagacaggaagttgtagaaacaatccgtctgaaactgcaatatcatcgagatccgaaacgtgctgaacagatcaagcagattaaaggttggtaaaaaatcactcctgtgaatggcaaacattcgcaggagtttctttttgggcaccgttttggcaccactggtcttatttttcaattttaaatttatctgtattttatcttgctgataaatatttcgctatttctctacttataatttttcaaatcattctctctttaagatacagaaaaacccgtagaaccgaagttctacgggtatcttacgtttagacacaacgttatcttacgataacaaatccatattaagattgtattactcaataactgtagcaacacgtccagatcctactgtacgtccaccctcacggatagcgaatgtaagaccctgctccatagctactggatggatgagctcgattgtcatctctacgttatcaccaggcatgcacatctctgttcctgctggaagctcgcaaacacctgttacgtctgttgttctgaagtagaactgtggacgatagttgttgaagaatggagtatgacgtccaccctcgtcctttgtaagaacgtaaacctgagctgtaaacttatggtgacatgttactgtaccaggcttagcaagaacctgtccacgaacgatctggtcacggttaataccacggagaagtgctccgatgttatcaccagcctgagcctcgtctaactgcttacggaacatctcgattccagtaacaacagtcttctgaacgtcctctttaacaccaaggatctctaactcgtcgttgaggtgaagtgtaccacgctctactctaccagttgcaacagtaccacgacctgtgattgtgaatacgtcctctactggcataaggaatggcttatctgtatcacgctgtggatctgggatataagaatcaacagtatccataagctccatgatcttgtctccccaaggtcccattggatcctcaagagccttaagagctgatccctggatgattgggcaatcattgaatccgtactcctcaagctgctctgtaacttccatctctacgagctcgataagctctgggtcgtcaaccatatcacacttgttaaggaatacgatgatgtaaggaacacctacctgacgagaaaggaggatgtgctcctttgtctgagccataacaccatcagtagcagcaacaacaaggatagcaccatccatctgagctgcaccagtgatcatgttctttacgtagtcagcatgtccaggacagtcaacgtgtgcgtaatgtctcttttctgtctcatactcaacgtgagctgtagaaattgtgattccacgctctctctcctctggagccttatcaatgttagcgaaatctgtagctgtgttaccagcgacacgagctgctaatactgctgtaatagctgctgttaaagttgttttaccatgatctacgtgaccgatggtaccaatattacaatgtggttttgttctttcaaatttagcctttgccattttgaaacgtcctccttaaacttttatgccccatgggctatttttataatctaccgactgctttgattatacgaaataatcaaagttttttcaagtaaattttatggcaaatccccctttttcaaggggaaatgcctttatttttgatttttataccatatatagtatatatttcatcatttgtactataaattgtttgctaatttgcaattattttgcgtggttagcaagaaccttgtcctgcacattctttggaaccggctcatatctgtcgaagaacattgagtagtttccacgtccctgtgtcttagaacgaaggtctgtagagtaaccgaacatctctgcaagtggtacatatgcatgtacaatctttccaccgccgagatcgtccataccctcgatacgtccacgacgagagttaacatcaccgataacgtctcccatgtactcctcaggcattgtaacctctaccttcatgataggctcaagtaatacaggtgcggcctttgccatagcctctttgaaacacatagatccggcaatgtggaatgccatctctgatgaatcgacctcatggtaagatccatcgtatactgttgcatggataccaactactgggaatccaccaagagagccggcctttgtagcctcctcgataccttcgccgattgatgggatgtactcctttggaatagcaccaccgacaacctctgaatcgaacttgaaaagttcttctccattggcatccattggctcgaaacgtaccttacagtgtccgtactgtccacgtccacctgactgcttagcatatttgtattcctgatcaacagcctttgtaaatgtctctttgtaagcaacctgaggtgcaccaacgtttgcctcaaccttgaactcacggagaagacgatcaacgatgatctcaaggtgaagctcacccataccagcgatgattgtctgacctgtttcctgatcagtatgagcacggaatgtaggatcctcctctgcaagctttgcaagagcctcacctaacttaccctgtccagcttttgtctttggctcgatagcgagctcgataactggctctgggaactccatagactcaaggataaccggatgctgctcatcacagattgtatcacctgttgttgtgaatttaaatccaacagcagcagcgatatcacctgagtaaacctcatccaattcctgtctcttatttgcatgcatctgaagaatacgtccgatacgctctttcttatcctttgttgcatttaatacataagaacctgccttacattttcctgagtaaacacggaagaatgcaagctttcctacgaatggatctgccatgatcttgaatgcaagtgctgagaatggctcctcatctgatgaatgtctctcaatctcatttccctcaagatctgttcccttgattgaagggatatctgtaggagccggcatgtactcaacaatagcgtcaagtaacttctgtacacccttgttacggtatgcagaaccacaacatacaggtactgctgtacactcacatgttgctttacgaagaaccttcttcatatcctctacagatggctcctcaccctcaagatactgcatcatgagatcgtcatctaactcacaaattttctcaataagctctgtacggtactctgcagcctgatcagccatatctccaagatcatcagtaactgtgatatcgtcacccttctcatcattgtagatatatgccttcatctcgaaaaggtcgataattcctttgaaatcgtcctctttaccgattggtaactgaagtacgatagcattttttcctaatcttgtacggatctggtcaacagctccgtagaagtttgcacctaagatatccatcttattgatgaatgccatacgaggtacattgtatgtgtcagcctgacgccaaacgttctctgactgaggctcaacaccaccctttgcacagaacacaccaactgcgccatcaagtacacggagtgaacgctcaacttctactgtgaagtcaacgtggcccggtgtatcaatgatattgatacgatgctcaagtgctcctggctttggtttagtgaactcttcaagtgtccaatgacatgttgtagcggcagaagtaattgtaatacctctttcctgctcctgctccatccagtccatggtagcagtaccttcatgagtatcaccgattttataattaataccagtataataaagaatacgctctgtcagtgttgttttaccagcatcgatatgagccatgattccaatatttctggttctctcaagtggatattctcttccagccaaggttttttcctcctatatttagtgtcctatgcacaaccggactctgttacaaatccggtccgctgcatgaatcaaaagcaaagctgtaagcttcttacagaaactagaatctgtaatgtgcgaatgccttgtttgcctctgccatcttgtgcatatcttcttttctcttaacagatgcgcctgtgttgttagctgcatccatgatctcgttagctaatctctcagcctgagttttctctcctctggcacgtgagaatgctgttaaccaacgaaggcctaaagcctgacgacgatcagggcgaacctcgattggtacctgatatgtggcaccaccgatacgtcttgcttttacttcgagagctggcattacattgttcatagcctcttcgaatacttcaagagctggtcttcctgtcttctcttctactgtagcaaatgctccgtatacaatcttctgagctacgcctttcttaccgtctaacataatgctgttaacaagctttgtaactactttgctgttgtacattggatctgctaatacgtctcttttctgagtatgtcctttacgtggcacgttacttccctccttaatcatgatatttgtggattaattcatcggtactcacatgtgtctctctaatgtgttcgtgcggaattgtattcataaagtgaaatcctgcatctgcaggtctaatcccaacactaacctactttagttctgtttgtgatacacaatgttgctaaattatttagcagcttttggtctctttgcgccgtacttagagcgggcctgttttctgtttgcaacacctgcagtatctaatgtaccacggatgatatggtaacgtgtacctggtaaatccttaacacggccaccacgaatcagaacaacgctatgctcctgtaagttgtgtccctcaccaggaatgtatgaagttacttcgattccgtttgaaagacgaactctggcgatctttctaagagctgagttaggcttcttaggagtagctgtcttaacagctgtacatacaccacgcttctgtggagaagaagtgttgattggcttcttctgaagagagttaaagcttctctgaagagctggtgctgtagacttctttacagatgtctgacgtccttttcttactaactggttaaatgttggcattattttcacctcctgttttattttaagcagtgcaatcttatgcacgctaaaatattatacaaatccttgtctgttttgtcaagaccaattttgttttcaatataatactttacgtttttaatataatacaagaaagaagtccggtttcccggacttctttgtttttggtttgtaacagcttctgtagcttaagtacaaacatcagtaattattcttcatcaactgattcagcttctgtatcattgactccgactgcctcttcctctgcgaaatccgcaaaatcatcatcatcaaaatcaagtgtatcgtcatcgtttacatcgctgtcaagcttgatgttacgataaatcttcatacctgttcctgccgggatgagcttaccgataattacgttctccttcataccgataagcggatcaaccttgcccttgattgctgcctcagtaagaacctttgtggtctcctggaatgaagctgctgacaggaatgagttggttgcaagagatgcctttgtgattccaagtaatacctgtgagccaactgcaagctccttgccctcttcctcaagcttctcgttgagctctaagaagtcaagggcatcaaccatgctgcccggaagtaaatctgaatctcccggctcctctacgcggatcttctgtaagcactgacgaacgataacctcgacatgcttatcgttaatctcaacaccctgtaaacggtaaacacgctgtacctcgcggagcatgtaatcctgaaccgcacgaacgcccttaatcttgaggatatcgtgtggatttacagaaccctctgtaagctcgtcgccggcctcaagctcctgtccgtctacaaccttgatacgtgagccgtaaggaatgaggtaagcctttgtctcgcctgtctcgttgtttgtaacgataacctcacgcttcttctttgtatccttgattgtggcaattccgccgaactctgtgataatagcgagtcccttaggcttacgtgcctcgaaaatctcctctactcgaggaagaccctgtgtgatatctccaccggcaacaccacctgtatggaaggttctcatggtaagctgtgtaccaggctcaccgattgactgtgctgcgatgataccgattgcttcaccaacctgtactgcctgacctgttgcaaggtttgaaccgtaacacttagcacatactcccatgtgtgaacgacaggtaagcactgtacggatcttaacctgtgtgattggattaccgttctcatcaacaccctctgccataacctttgctgcacgctttggtgtaatcatatggttggccttaacgattacattgccatccttatcgcagattgtgttgcaagagaaacgacctgtaattctctcctgaaggctctcgatttcctctcgaccctccatgaatgcctttacaaccattcccggaatctcacgtcctgtgcctgcacagcagtctgactcacgaacgatcatatgctgtgaaacatctacgagacgtcttgtaaggtatcctgaatcggctgtacgaagcgctgtatccgaaagtcccttacgagctccatgtgctgacatgaagtactcaagtacgtcaagaccctcacggaagcatgacttgataggaagctcgattgtacgacctgttgtatcagccatgagtcctcgcatacctgcaagctgtttgatctgcttatcagatccacgggctccggaatctgccatcatgaagatgttgttgtacttatcaagacctgtaagaagtgcctttgtaagggcatcatctgtatccttccatgtctcgataacctctttgtaacgctcctcatcagtgataagtccacgcttgtactgtcttgtaatcttatctacagtgtcctgtgcatcagcgatcatctgtggcttctgtggtggcaccgtcatatctgaaattgaaactgtcatggcagcctgggttgaatacttgtatcccatagccttgacattatcaagaacctctgctgttgttgtagctccgtgtgtgttgataaccttctcaaggatctgcttgatctgtttcttaccaacgtggaactcaacctcaaacttgagtgcattctcagcctttgatctgtctataaaaccaagatcctgtggaatgttctcattgaatatcaaaagtcctactgttgtctctgtaaaacctgaaacctctgtgccgtcagcaagctttactgtacggtgtacaaagatattctggtgaagagtaatctccttgttctcgtaagcgagcattgcaagattaacacttccatagtaacggccgagaagatctatcggtctgcaaagcacacgacggtttccgtctgtgacatcctcaaaccagatgaggtcatataagccaagctcagcctttcctgtattttcatcaggagttgtaagctttctaagctcctcaatatcattgtatacagtgtctgatgacacctgtgcaaccatctttggatcatccttgtaatcagcgagctttctcattgtgaggtagtaaactccaaggatcatatcctgtgaaggaacggctacaagtccaccatcggaaggcttaagcaggttgttaggtgacagaagcatgaatctgcactcagcctgtgcctcagcagtcagtggaagatgtacagccatctgatctccatcgaagtcggcgttgaacgctgtacatacgagtggatgaagcttgattgccttaccctctacaaggattggctcgaaggcctggattccaagtctgtggagtgtaggagctcggttaagcataaccggatgctctttgatgacgtcctcaaggacatcccatacctccggctgaagtctctcaaccatcttctttgcactctttatgttgtgtgcggttccgttagcggcaagctccttcataacgaatggtttgaaaagctcgatagccatctcctttggaagaccacactgataaatcttaagctttggctctacacagataaccgaacggcctgagtagtcaactcgctttccgagaaggttctgacggaaacgacctccctttcccttgagcatgtctgaaagagacttaagagctctgtttccaggaccggtaacaggacgtccacgacggccattgtcgataagtgcatcgacagcctcctgaagcatacgtttctcgttacgaacgatgatatccggcgctccaagatcaagaagtcttctaagacggttgttacggttgatgattcgtctgtaaaggtcgttaagatcacttgttgcaaaacgtcctccatcgagctgaaccattggacgaagatccggtggaataacaggaataactgtcataatcatccactcaggcttgtttcctgactcacggaaagcctctacaacctcaagtctcttgatgatacgtgcacgcttctggcctgtagcattctcaagctctgccttaagctctgcagaatccttctcgagatcgattgctgctaaaagctcatggatagactcagcacccattcctacacggaatgctgagcggccataagtatcgcatgcctcctggtactctgactcgttgagaatctgcttgtatgcaagctttgtctcgcccgggtcaagcacaatatatgaagcaaagtacagtactctttcaagtacacgtggagataagtcaaggatgagtcccatacgtgatgggatacccttgaaataccagatatgagatacaggagcagcaagctcgatgtgtcccatacgctctctacgaacgcttgactttgtgatttctacgccacatcggtcgcagacaacacccttataacgtatcttcttgtatttaccacaatgacactcccagtccttcgttggtccgaaaatcttctcgcagaaaagaccgtctttttcaggctttaatgttctatagttaatagtctcaggctttttaacctcgccatgtgaccactctctgatcttttcaggagatgctaatccaatctgaatcgcatcaaactgcattgcctgattattttctatattatttgtttctggcattttggcactcccttctaattattcttcgtcatcaagaacttcatcagcaaaaatatcgtcatccgctgtctcaggagactcttcctcttctatgtcaacaagctcttcgttgtcatcaaattctttctttgagaaaccatgctctgcgaatgactcactgtcctcgaatgcatagtccttatcgtttccgataattgagttgatatctgtattaccgtactcacttgtctcgataagctcgacctcttctctgttctcatcaagtaccttgacatccagaccaagtgcctgaagctctttgagaagtaccttgaatgactctggaataccaggctcagggatattctcacccttgatgatagcctcgtaggtcttgacacggccaacaacatcatcggacttcattgtaaggatctcctggagtgtatatgcagcaccatatgcctcaagagcccaaacctccatctctccgaaacgctgtccaccgaactgtgccttaccaccgagtggctgctgtgttactaatgagtaaggacctgttgaacgtgcatggatcttatcatcaacaaggtgatgcagcttaaggtaatgcatgtgtccgatagtcgtctttccatcgaagcactcacctgttctaccatcacgaagctgtacctttccatccttggaaatcggaacgcccttccataagcttctgtgagctctgtttgttgaaaggtattccataacgtcctcacggagtgtatcaacatatttatcatagaagatttcagcatctgcgctccagtatggatgctcagcctgtaaatccttctcaagctcttccttatcgaatggaagatttacgtaatcatttgcaagctcaagtgtatcctcgatatctacctcgttagctccgtcaaatacaggagttgagatattgaagccaagtgcctttgcagcgagactcaggtgaatctcaaggacctgaccgatgttcattcgtgaaggcacaccgagtgggttaagtactatatccagtggacgtccgtttggaaggaatggcatatcctcaacaggaagcacacgggaaacgacacccttgttaccgtgacgtccggccatcttatcaccgacagaaatctttctcttctgtgcaatgtagatacgtactgactggtttactcccggagaaagctcatcgccgttctctcttgtaaataccttggcatcaacaatgataccgtaagcaccatgaggtaccttaagtgatgtatcacgaacctctcttgccttctcaccgaagatggcacgaagaagtctctcctctgctgtaagctctgtctcaccctttggtgtaacctttcctacaaggatatcaccggcacgaacctctgcacctacacggatgatacctctctcatcaaggtccttgagtgcgtcgtcgccgacaccagggacatcacgtgtaatctcctcaggtccgagctttgtatcacgtgactctacttcatattcctcgatatgaactgatgtatacacatcatactctacgagacgctctgaaagaagaacggcatcctcgtagttgtatccttcccatgtcatgaatccgataagcgggttctttccaagagcaagctctccctgacttgttgaaggaccgtctgcgataacatcgcctgccttaaccttgtcacccttaaatacgataggtctctggttgtagcagtttgactggttagaacgagagaactttgtaaggatatactctctcttgtttccgtcagtctcttttatgataatgcggtttgactctgaagataatacctctccgtctgcctttgcaactacgcagacacctgagtcaactgcggcctttgtctcaatacctgtaccaactacaggagcctctgtggtcagaagcggaacggcctgacgctgcatgtttgatcccatgagggcacgtgtagggtcatcgttctgcaagaatggaatcagcgctgtagctactgagaataccatctttggagacacatccatataatcaaatgctgacttatcgtactcctgagtttcctctctgtaacgacccgaaactgaattacgtatgaaatgtccttcagcatcaagcttctcattagcctgtgctacgtggtagttatcctcctcgtcggctgtcatgtatacaacctcttctgtgactaccgggttcttaggatcagtcttgtcaatcttacggtacggagcctctacgaagccatactcattgattctcgcatagcatgcaagtgagttgataagaccgatgtttggtccctcaggagtctctacaggacacatacggccgtagtgagtgtaatgtacatctcgaacctcgaatccggcacggtctcttgaaagaccaccaggtccaagtgctgataaacgtctcttgtgagtaagctctccaagaggattgttctgatccatgaactgtgaaagctgtgaagaaccgaagaattcttttacagcggcagttacaggctttatattgataagtgactgaggtgaaattccctctaagtcctgtgtagtcattctttcacgaacaacacgctccagtcttgagagaccgatacggtactggttctgtaacagctctccaaccgcacggatacgtctgtttccaagatgatcgatatcgtcatctgttcctgcgccccactctaagtgcatattgtagttgatagttgcgaagatatcctctttagtaatatgctttggaataaggtcagatatatctctctttatagcctcgattctgtcctcaagggaatcatactcctcgagaatctgagcgagtaccggatagtaaacaagctcagtaacaccgatagacttaggatcctcaagctcaggaatccagcttctgatgtcaaccatcatagaagaaagaatcttgacatttcttgtctctgtctgaatccataaagcaggaacggcagcgttctggatctgtgtggcaagcgcacggtcaacaacagtacctgcctcagcgataacctcacctgtagaaggatcaactacgtcctcagctaaaacctgtccactgatacggttctttaaagcaagcttcttattaaacttataacgtcctaccttggcaaggtcatatcttctaggatcgaagaacattgctgtgataagactctctgcactctcaactgaaagtggctcgcccggacgaatcttcttatataactctaataaaccagcctcatagcttccctgtggctcacgctctgtgattgcagggtccttgctgaatgatgcctggatctttggctcatctccgaacatatcgagaatagcctggtttgtacctactccaagtgcacgtaaaagtactgtgataggtaccttacgtgttctgtctactcttacataaaaaacgtcgttagagtctgtctcatactcaagccatgcaccacggtttggaataacagtacaagaatacagggtctttccgagcttatcatgagcaattccgtaataaataccaggagaacgaactaactgactgacaataactcgctctgcaccgttgattacgaatgtaccggtctctgtcattaaaggcagatcacccatgaaaatttcatgctcattaatctcatctgtctctttgttgtgaagtctgactttaacctttaaaggagctgcgtatgttgcatctctttccttgcactcaggaattgtatactttacatcatcttcgcataatgtaaaatctacaaaatcaagactaagctttccgctgtaatctgtgattggagagatatccgcaaaagcttccttgagaccttcgtctaagaaccactgataagaatccttctggacctcaatcagatttggcatctgcagaacctctttttgtcttgagtaactcatacgcatgctttttccggatgtgaccggacgtattctgtttttctccattgacgtttcacctctcgtttttattttaatctagcaagtatctagataatgattcaaaaaccaccccagttactatatcttgtggtttttctcttgtgcacatatttgtgaatgcattttagtgtaatttacctattgacaaattt

SEQ ID NO: 1509 - DNA, 372 bp, Unknown
  gut microbiota DNA sequence
tcacagctttgcttccctttgtttacgccattgtagcacgtgtgtagcccaagtcataaggggcatgatgatttgacgtcatccccgccttcctccaggttatccctggcagtctctctagagtgcccggccaaaccgctggctactaaagataagggttgcgctcgttgcgggacttaacccaacatctcacgacacgagctgacgacaaccatgcaccacctgtcactcctgctccgaagagaaggtacggttaagtaccggtcagaaggatgtcaagacttggtaaggttcttcgcgttgcttcgaattaaaccacatgctccaccgcttgtgcgggtccccgtcaattcctttgagtttcattcttgc

SEQ ID NO: 1510 - DNA, 23422 bp, Unknown
  gut microbiota DNA sequence
cttcttccgtttatcctttggtggaagcacaggcacaaagaaacagatagaaaggggaacagtaaaatgtaatagggtgaatgattatagcaaaaagaccagtatcaatatatgattttaaggctttcggggctgccattaaagccgcgagaaacgaatacggagaaagtcgcaaaaaagtaagcgacgagttatatatctccccgcgctatcttgcgaatatcgataacaaaggacagcagccgagcctacaagttttctatgacctcgttacccgttatgctgatatttgggtgtgttctgactatatgtatcattgttatggcaatacctaatgcgtgctgattagtatttttttatattgctccgcaagctctttctttccccatctcatatacaaactatacaaataacgagcagtacttttggaataatcattatcagggttctcgttcataacagcatgaaagacggcatctgcgttaagcaggtgctgttctgctatcacaggctgagaacgggtataagcaatgacaccacgatagaactcgcacataccataatcaaggttatttctacccataacttcatcaatggtggattcacagaaatcaataatttccagagcagaatcatattccttattctgcaccagcatgttagcaagtgagagtgtctgctgcagggtatcattattctctatcaatccaagactggcatattccctgcgtactgtgaaagctgtcttgagttctgatacggcttcttccagtttcttccggaacagataagctgtagagaggttgttgtgcaggtttgaaagcagattggcggaacgggcatccgcagtattggtcttatggtaattttccatgagggcaatcgcctttttatatttcttaatggcattatcatattccttgcgtgggaacagaagctgtgctttgtaatctaataataatgctttgtcacaggcagaaatgtggttggtttcttgcgtaatatctggtgtgcctgatttatctgaattatacgatttactcgtttcatccgacttgcccgaatcattcataagattcatcacatattctatacgttctaccagctccgacagataatcggtatccagatatttgtcaaagtaagggtacatatcctgtaagaacagtagatagtaagccctgttatctaggatgatgtgtctgttgatgcttttcagacattccatgacagtcaccggtctttttacatccagaccgtgagcaaggcaaatcaaatgcaggtgatttaacatcacatggcagtctgatacggttggaatggtctctgcgattgccacttcctgaatgagaggatggagtgcaatcgtcttattttcggtatcttcactgataatgccatagcgtatcagctcattaacatttttgagagaatccagttccagccacattttgaacgcacttttataaactcctgataccggcaggagtgagaggttacggaggatatcaatactgtcctcatttaatctattaagcttcatcaacatgcgaaggtgtcctatcatactggcataggagaattcatcatccttgaatacctcgatttcttccatgttctgcccgataccgcaggaacgcagctcctgtaacaattcttccggttccatgccgctggcttctaaggtaagagcagccatgcagacagtcagggtatgacagttcacttcttctataatggcagacacactgtccggatcacgttttgcagaaggacaatgcttgtagaacagttctgtcagttctttttctttatccaattcctttatttctatagaatcataattcttaagtttgcatctgctggtaatcaatagctgcatatcattcttcatcagttcctttaagaagggttcgtcctttggaagcacattgaagttgtccagaatcagcagtgtatctgtgtggagtctctgcatcaccttatagtgattctgaaaacggacttcctcattcatttctacggaatcatctgcaaatgtaaggtttgcgatgtcttttctcaaatcaccggtgtaatacagataaatgatattggtgtactttttacggttcgtctgtgcataggctttggcaacttcgctttttccaatgcctgccataccagtaatgaataagacggattgattggaaagatgggatgcgattgcttttatctcatcctttcgtccaatgaatgcctgattgcaggagggaagcttattgcaaagaatcacttccgaaaggtcgggagaatagagcgcacctgtgctatggtcattcaaaatcgcatatcttaccacagagcagaaaaaggctgcattatccggctcctgaatcagtgcatcagccatttcctgcccgatggtttttatactgtctgtaatcaattcctccatctggattcgagcctgtgcttcgttcaacaggttcggaataatcttatctctgaaatcatcctccatcgtatcccattcatcctcatcttcataagtctttaggatatctataggaatcgggcgggcgccattgcaccagcggctgtacatcgtcgtgtcatctgcgattaattccgaagctgtcagagtatcatccagatatgcagagaacagactgcgtacaagctggtgctgcgggtaggttttctttttattttccaataatacaccaatcacattggcgaaggtcagtctgtttctcatctgtgtgctcctttcagagaggatttatcaatcccgctatctatcttatctgtctttctatattttcattctttgaaaagtttctatgtcaagtcgcggtcaagtgaccgtcaattattttattctctatattttactacaattaacttacaaaacgtagccgggcggcatcagaaatgaagcaaatcggctacaacaatcataacacaaaacaaacttatgttctacaagaatatcgaaatgttttaactgtacattgaaaacttcatgagttgtattcacagtcaacggactttgcgatgatacttaaagcaatttaagcggagcaaagaacagacacttccgtcaagggtgggagatgatctcgcgcaggagaggcccacaggcaggtttcagtagtgagaaatcggtgctaaagaatccagacagtggatacgtagaaaaccaaactaagagtactggaacaatcttactttaggaaccgcttattgcgggtaggaaagaaggtggttaatgagaatattacgagaggaggcaggactaccatgaaaacagaacttgatacaagagcgttattaaatgtaaaggaaatgtgtgagtaccttggtattggacagacgaaagcaagagaattgctttccaatccggccaatggtttcacggtaagaatcggtaacagactatatgctcataagggcagattagaccactggttactgaatcagattctttcataaataagaacacggaggagtttcaaaatgagaattcaatttttgaaacggattgataattgtaaggttttatggtagaatagggacgatatttggaatccttcctattctacacttaggaaggaggcataaatgggtaaatcccttaatggtaaagaattaggtaaaggcttatcacagagaaaggatggtctttatcagggaagattcgtgaatcgttttggcaagaagcagacggtttacgcaaagacgctgaatgaggtaagacagaagcttagaaacgaacagtatgaggatgaaaaggcactcaatgttgttgcgaaggacgtaacgcttgacgaatggtatgaaatctggatggatacctgcaagaagaattgcagagactccaccaaggagacatacgcaggtcattatcgcagaatacagaaggctctgggatggagaaaactcacatccttgaatttactgattatgcagcaggcgattaacgaactggaaacagacaatgagcgtaagaattcgaaaaagatactggtcgatatgctggagaaagcaatagactctgatttacttatcaaaaattctgctaagcagatcaatactgtgatttctaaagaggttaagaaagaacgtagagtattaacggtaggtgaaacggagcttttttttagctatgcgaaggacacattctactacaatttatatgtagtggcaatcgacacaggaatgcgtattggtgagttgatggggcttcagtggtctgatgtagactttgaaaagaaggttgtacacgtcagacgttccttatgctatttccgcaaggatggcaaatatgtctttgaatggcatgataccaagacgcataacagcaagcgaaccattcccttaacaacaagagctatggaagctctgaaaaaacaaagagttcgcgggcaggagattctgcttaagaacgcacaaacagcacaggacgaatacaagaatctggttttcgtaaccagaaacaatcgacctacacagcagttcatcgtacaggaatgtatggatgtaacaacgagacgaattcagaaggaacacccggaatttgagaggttctctcctcattgtttccgtcacacctttgcaacaagggcaatcgagaacggaatgcagcctaagagcgtgcagaagcttctcggacatggctccttacagctgacaatggatttgtattgtcacgtaacagatgataccttgtttgacgagatgaggaagatggaagcggtgtaaagtgtgtaaaaagtgtgtagtaaagcaatttgagacaataataaaggcgtgaaagccttataaacaggaggttttaagataaaatggaacagtataagcaggaatttatagactttatggtggagagtgacgtgctgaaatttggtgatttcacattaaagagcggccgtaaatcaccatttttcatgaatgcgggagcatatgtgacaggctcacagcttaagagactcggagagtactacgcaaaggctatccatgctaactacggagatgactttgatgtattattcggacctgcatacaagggaattccgcttgcagtggtaacagctatcgcataccatgaactctatggcaaagaggtgcgctactgctcagacagaaaagaggcaaaggatcacggtgcagacaagggaggcttccttggaagcaagcttaaggatggcgacagagtagtcatgatagaggatgtcaccacatccggcaaatcaatggaggagacagttccaaaggtaagagaggctgctgatgtcacaatcgtaggccttatagtgagccttaacagaatggaagtcggacagggcggcaaggtgagtgcgcttgacgaaatccatgagaagtacggctttgagggcaaggcaatcgtcacaatggcagaggtcacagagtatctctacaacagagagcatgatggcagagtagttattgatgacacaatcaaagcagctatagatgagtactataagcagtacggctgcaaataggagaatataaattgcttggcagaagaaaacgtaacaggtataagtttacggaaaagaagcaatctaagagggggatagctgcacttgttgtggctatcctcatagagattgtatatatagtttttttgaatgcggcattcagaggagatggcaatctgtctatgtactatggcagtgccggtatactgatgcttggcatatctctggcagatttcgggtttgccataagaagcctctttgatgaggaatcattcatgacatttccacgattggcagtgttttttgcacttatagcggtgctcagctggggtgggacgtatgctgccggctttattatttagcacatattatatcaatagtgctataaaactgtcatgaatatttgaattataaaatagaaagattatagggatatatgagttataaagagatttatgaactctccaatgagctttacgcagagcgattagagcttgtggaggagcggatagaacagattatcagagagcctgcgatagagccggcttttgcagattatttcagaagtgcggcaaagtgcatcaacactattaaaaaccatagcgcagataaggaatttaacgatttattctattcacagtttgataaagaaaattacgagaaaagctatgccaacccggcatacgctgtaaaggtgctcggagatgagtatggtcagcttttatcggctgtatatgcaaaaattgccggaagcattacacatatctatcagggggatataaaatatctctgcatttatgcagagcttattgtagagctatacaattattttgagaatgccaatgagctgagtcctgatgagataaggggctgtatatactcgttcatgcatgattatgaggagatttttgcagaggatgacaacggagcactccttgacccggcttatgattactatacagagcttgtaaatgaggcagatttgtcaaatgatgattatctgtattcctacggactgtatgtcggagagaatgagcgcgccggcagagcacacctggcttcattttcagatgaggagatacaggccatggcagatacctatacggaagggtaccgcattggctttattacctgcaacaaggatatctcaaagaagtcagtagttcaggtgatttatccgcttggttttgagcgtatgataagagctgcattaaagaatttcgagaaaatgggtatgaagcctgccatgagaccattttccacatcggtcaacaagcagtttgactatgaccacaaggaggatatggcactgtggcttgacaaggcatatgtggagtaccgtcttgagtgcatgcacaatgcacttgagagaatgaaggatgtagcatgcaaatgtggaggaccggctgtcatagagatatttggagaggagccgtttgctcctgtttcaaaaaaggaggctgcgcactataacgatgagcagcagaagcttgcagtccatatgacaagcgtgcgctcacagtatatgaacagctatatccacagcgaggacagaagctttacgattattgcctatccgtgtgctgcaatcggacctgattataaggagatttttacggaaaccgtaaagattaatacgcttgattatgcactttacagggatatgcagcagaaaatcatagatgtgctcgatacggcagacagggtgcatattgtcggaacaaacggcaacaggacagatttgtatgtcaagattcatgagcttaaggagccttcaaaggagacagcctttgaaaactgtgtggctgatgtaaatatccctgtcggagaggtgtttacttcgccggtgctagagggcacaaacggtaagctgcatgtcagtcaggtatatctcaatgagcttaatttccttaatctggaaatagattttaaggatggcatgattgataaatatacatgtaccaattttgaggatgagaaagagaataaaaagtatatatcagacaatgtgcttttccatcatgacacactgcctatgggtgagtttgctataggcaccaatacgacagcctaccgtatggcaagagtatacgatatcgcggcaaagatgcctattctcatagcagagaagacaggacctcattttgcagttggtgatacctgctacacatacgatgaggacaatatgacatacaaccctgacggaaaggcaatcattgccagggacaattcagtttccatccgcagaaaagaggatatatcaaaggcatatttcaactgccacacggatatcacaataccgtatgatgagcttggagcaatcacagttattaggcacgatggctcaacatgtgatataataagagatggcagatttgtgcttgagggcgtagaagagttgaacaaaccgctcgatgagcttgatgcagaaagtaaataattgttagacatataaggaggataaaatggcaaaggttggaatagttatgggcagcgactcagatttaaaggtgatgagtaaggcggcagatatgcttgaagaactcggcatagagtatgagctcaccatcatctcggcacaccgtgagccggatgagcttattgagtggacaagaggtgctgaggatagagatgtaaaggtaataatagcaggagcgggaatggcggcagcccttccgggaatgtgtgcagcgctttttgcacttcctgttatcggagtaccgctttcaggaaagaatctggacggaatggatgcagtgttctcaatcatgcagatgccacctggagtgcctgttgccacagttgcaattgacggtgcgaaaaatgcagcaattcttgcagcaaagatactcgcagcaggtgatgatgcaatccttgagaaaatcaaaaagtatacagcagatatgaaggctcaggttgtagcaaaggatgcgaaactgaaacaggttggatataagcagtatcttgctgagaaatagattgtattgtcatctataggagggtttttatgggtatattgcaaaaggcggacagatgtatggatgaggcagcagccttatttggcgagaataagctttttttggcagagaataaggcacaggagacagccggtctttataagagctgtggcgcatatgagcagatggcaaagactgtcaattttatgggagtcatatatgcatctattggagacttaagcatgtcaattgactgctacctagaggctatggatgtagctgtggagcagggctcaacagagataatcatgcttgtaaacaataatataggctcactctatatggagcttggattgtatgaaaaggctatcagatatttcaacgaagcactggagctgtgcaagccaccgctgcatggagagagggatagctattatcaggagcttctcatgcttcatctgaatctgtgcatatcatacacgggaattaatgagtttgaaaaggcagaaaagcatctttctgacgcgatactctttaatgagatagctggcagtgataaaaacagatttctgatagatatgtcacaggcacatatgctatggaagatgggaaatgaggatgaggtcagagatcatgtggaagagctggttgagggtgcgataaacaatatcaattctgacaattatgtacttgagatactaagcctttgcaatctatttatgaatatgggagagttcgatgcatggaaaaaggttattgtggagtatgaacgctttgctattgaaacagaaaatctgtttttccagaagacctgtgtcaagatgtggatgaaatatgagagcgccatgggtgatacagaggcgtacaacaagctgtgcgtatattacgcaaatctccactctatgcaggtgaaggagcagataaagcgtcttggtgatacaatcgaccttaagcttcagcttcaggagactgagtatgagcgccgtaaggcagtcagactcaactacacagatatgcttacaggcatgggcaataagttcaagatgcgaaacgattttgaaaagcttgtgagcaaaaatcaggattcagatggtgcaggaatcacgtttggagtagtggatatagatttcttcaagtcatttaacagaaacagtggcatagtcaccggtgatgcagtgctaaaagaattgtcatccataataaatgagagcatcaaagataagggaatggggtatcatttctatggcgatgaattctacataatcctgcaggaaacggatgaggatatcattaaaaatatagccgagcatataagacttgagcttgccaaaaaacagatacttcatgagagctctaaggtggatgagtatctgactgtatcacaggcatatgttaccgccccggatgtaaaggtgccggatgagttttcaaagctgttcaagacggtggatgaagtgctcaatgatgtgaaggaaaagggtagaaatgcatataagatagtctgatgctttaagcgtataagacaactataaaatgacacgcagcgtaaaacgttgcgtgtcatttttaatggatctatatatacagttatagttatatttgtacttatatttatagttatagttatatttgtacttatacttttacttttatatggctatattgtctcatttatattccggatataacaatatcagtgccggccttctcatatatatctgctgtctcaggtgagataccggagtcggtgattaccatattgatgtcatcaagcgatgcatagctagatatggatgtggtatcaaacttggtgtggtctacaagagccacagttttagcggaggccttgatacacatgtgctttaaatcagcctcgtatatactgaaatcagtcagtccgtcttctacagagaagcctcttgctgacacgaacgcgatatctgtgtgtatctttttgagtaaatcagcgccaagcagtccttctatggaagcggatgcactggttacgataccgcctgtcaggatgactgtgacaccggggatatcctttagctctaaagccagattgatgccattggtgatgacggtcagctctgtaaagcctgaaagcttcatgccgagagtgtaggctgtggagctggcatcaaggaatatacacatatggtcacttacgagctttatcgcctcgtttgcaatctcctctttagcttccttgttttccagggcacggtcatggaacaggtaggccctcgaggttaaatcagtcatgtcatgggttttatccttgtagatagcaccgccgtgagtctttgtcagaagcttttccttatccatctggtttaaatctgttcttattgtcgtggtcgatacaccaagcagttcactgagctcattggtggtggccttgcggttttcttttaaataatcgagaatcttttgttgtctttctaattgcagcatagattttcctctttcttttgatttctgttgtatttttgcgtacatatttttatcacaaagcattgcataaatatataataactcaaataagtaaataaagccagtgttttcgattgcttatgtttttttttatttgatgacatttaattatatttatttttacttttatttacttttactattgcattttttcttttaaagtgttatatttatatcaacaaataaaagcaaacacaaattatataaggcggaggtattattaaatgaagtttttcgtagatacagcaaatgtcgaggacattaagaaagcaaacgatatgggagtcatctgtggagttacaacaaacccttcactcatcgcaaaagagggcagagacttcaatgaggtaattaaagaaatcacatctatcgttgacggaccgataagcggagaggtaaaagccacaacagttgatgcagagggcatgataaaagaaggacgtgaaatcgcagctatccatccaaacatggtagttaagattcctatgacagttgagggacttaaggctgtcaaggtgctttcatctgagggcatcaagacaaacgttactcttattttttcagcaaatcaggcaattcttgctgcaaatgcaggtgctacatatgtttcacctttccttggcagacttgatgatatcagccagccgggcattgagctgatcagacagatttcagagatttttgatatctatggatatgacacagagattattgcagcttcaatcagaaacccgattcatgtcacagactgtgcacttgcaggagctgatatcgcaacaattccttacaaggttatcgagcagatgacaaagcatccgcttacagatcagggaatcgagaagttccaggctgattacagagctgtatttggggattagatattataaaccaaagaccggtataaatattttatttcatgtcatagatttaacaggagaacaaaatgaacaaattagagcttcagattacagcaaatgaagtcaggaagggtatcgtcacggctgtgcattctgcaaaggcgggacatccgggcggctcactttctgcagcagatatatttacatatctgtattttgaggagatgaacattgatccaaagaatcctaaaaagccggatagagaccgttttgtgctttcaaagggacacacggctccgggactttattctgcacttgcgcagagaggctattttccggttgaggatttaaaaacactcagacatctgggatcatatctgcagggacatcctgacatgaagcatatcccgggtgtggatatgtcgagcggttcgctcggacagggcatttctgcggcagtgggcatggcactttctgcaaagcttacaaatgatgattacagagtatatacacttctcggcgatggcgagattcaggagggacaggtctgggaggctgccatgtttgcgggcttcagaaggcttgataaccttgttgttatagttgataacaacggacttcagattgatggaccggtggatcaggtgtgctcaccatatcctattggtgagaaattcaaggcattcaatttccatgtgattgatctgaaggatggaaatgacatggatcagattgctgacgcatttaaagaggcaagaaatacaaagggtatgccgacggcaattatagcacataccgtaaagggcaagggtgtttcatttatggaaaatcaggtcggctggcatggcaaggctccaaatgatgaggagtatgcagttgccatggaggatctgagaaaggaaggtgaagcattatgtcagaagtaaagaaaatcgccacacgtgtcagctacggaaatgcacttgtagagcttgcaaaggagcacgatgacgtatatgttcttgatgctgaccttgcggctgccacacagacagccatcttcaaaaaggaatttccagatcatcacatagactgtggtatcgcagagtgcaacatgatgggcattgctgcaggacttgcggctacgggaaaggtgccatttgccagttcatttgccatgtttgcggcaggtcgtgcgtttgagcaggtgagaaactctattggatatcctcatcttaatgtgaaaatcggtgcgacacacgcaggtatttcggtaggagaggatggagccacccaccagtgcaacgaggatattgcactcatgagagcaattccgggcatggttgtaataaacccaagcgatgatatagaggcaagagccgccgtaaaggcagcctatgagcatgagggccctgtatacatgaggtttggccgtcttgcaacaccgataataaatgacaatgcagagtataaatttgaaatcggaaagggtgttacactccgtgagggaacggatgtagctatcatagctaccggtctgtgcgtggcagagtcacttgcagcggcagaaaagcttgcagcagatggcgtaaatgcaaaggtcataaatatacacactatcaagcctcttgatgaggagcttgttgtagccgcagcaaaggaatgcggcagggtggttaccgtggaggagcactctgtaataggcggacttggagccgcggtatgtgagacactttcgcgtaaggctccaacaccggtaaagacaataggcatacaggactgctttggtgagtcaggtcctgctgtagctttgcttaagaaatacggacttgatgcagagggcatttatgcatcagtgaaggattttttataagtatttaaaatagtttggttttatcatttttcacattttccccaatataacaataaactaataaaagaaaggacagccgggatacggttgtcctttcttctactttgtatacatataaaaactttaatgttttaattagtgtaaaataatttaataaattctaaaatatatattgtgttataggtttttatctgatatagtaaatctataaatgctgggcgacctgtgttttcgtataactgataaggcaaaaagaaaggggacatcacatggaactgatatgtaagaagtgtctgcttagagaaatggcagaggccgacgcagcaatgataaaaaaatatgttgatgcgataaagggcgaggacagagtgccggaaaaagagtatgaggcaaggcttgcagtgtgcaaggcgtgtgacaggctaaatgccggaacctgtaatgcatgcggctgttatgtggagcttcgggcgcttacaggcgtttcgcactgccctcataaaaagtggtagtacaaataaaataataacaaaatgactgcggttttgatttccgcagtcattttattattatttagtgtttttttcagtgtcaagaggtgcataattgatggatacaacaatgtcctgatcgtagttaccgaagctttttccgaatattgtgagtccgccgacatgggcagaatcctcctcgacagctatacggaagcgtatagtgcttgtgtagtcaagctttagctcagaggttgtgatatctgatatcttgagaccatctatgaaggtgcctttatgatttatgactaaaagcttgagtagaccgtattgattccagttctgaggccaccattcaggggtaaacattccgcgtacatctccatagtcaccgggagaggtccaggtgccgacaagagtgtcattgatgtaaaagcttatatcacttggccagtcgttgtcgatgcccggagcctcagaacttatctcggctgagagtgaaagctgggtgattttctgattacgtggaatgaggtttggaattacatattccacatagccttttgtgaaccacataatgtctgcattgaaatggtcaggatggtcaaagtaacgcgcgtcatcgagctctcctatcacaaatgaggatgtagccaggccacaggttggacagatattgtgagatgaaaactgccctaccttgatggatgtgttgtatacgttacttaagtctattggtttttcaatttctactaatatacgatcctgaatcagtgaacacagcttctggttgccgtgaccggatgaatcgtttgaggcggagataagtccacactcctcaagcttttttatatgtccggttaaagctccattgctgatgtttagctcgtttgcaatctgattcatgctcatctggttattctcgagcagaatttttaaaatctggatacgaatatcagagccgagagctttaaacagttcgagaccatcgtctaatgatgtgatatgtatcatatatagattctcctaaaatattttataaaattaacaacgagttcttgtgtgtaaatcatgttttaattataggaataagctcctatgttgtcaatatattattgtatagttttaagctatatggaaataggttttaaaattatttaaatatattgtgcaatatgtataacttacatgcgtttcaaaacgaaaataaaataaaattttagatattattaaacaatatgtaaaatagtttaaaataatctaaaataaatattgacattgcagctactctcatgtatattatgtgcataagcaaaacacattaacaatcagtgcacttatgtgtgcaacaatggcagagcaggataaatgtataagagataaaggagaaaatatggcaaaaattattgtaaataatgagaataaaaagagtacaattgctccggagatttatggacatttttcagagcatctcggaagatgtatctacgagggattatttgtaggggagaattcagatataccaaacgtaaacggtatgcgtattgatgttgtagatgcattaaaggaaatgaagatacctgtgctccgctggccgggcggctgctttgcagatgagtatcattggatggatggtatcggtcctaaggagaagagaaaaaagatgatcaacacacactggggtggtgtagttgaggacaacagcttcggaacacatgagttttttgagctttgcagacagttaggctgtaagacatatgtgaacggaaatttaggaagcggaacagtgcgcgagatgagtgagtgggtagagtacatcacatttaacggagtatcacctatggctgatttgcgtaaggaaaacggacacgaagacccatggactattgactacttcggtgtgggaaatgagaactggggatgtggtggaaacatgcgtcctgagcattatgcagatgaataccgcagataccagacttatgtcagaaattatgcaggcaatcagccaatcaataaaatctgctgtggtccaaatgtggatgactatgagtggacaaagaaggttatggctacatgctttgaccattgtgatccgaaactccatggtctgatggatggattatctcttcattattacacacttcctgagactgaggatgactggaatatcaagggaagtgcaacagagtttacagaggatatcttttatcagactcttaagagaggatatttcatggaggagctcatcaatcgtcatggagccataatggatgagtatgatcctgataagaatataggtcttattgttgatgagtggggcatctggtcagatgtggagcctggtaccaatccgggattcttatatcagcagaacacaatgcgtgatgcgcttgttgcaggtatgacattaaacattttcaacaagcattccgaccgtgtcaagatggcatgtattgcacagcttataaatgtgcttcagtctgtaatgctcacagacggcgataagatgataaagacacctacatattatgtattccatatgatgagacatcatcagggcgcagctcttttggacagctctcttgtaggagaaactacagttggtacaggaaagaatgagcttccgaaggtttttgagtctgtatcagaggataaggatggagtgattacagtcacacttacaaacaattctcttgagtcgtcagaggatgttgatattatgcttacaaatgagggtgacaaatacagtgtaagtgaggccagatacatcgaaggtgccatggatgcacacaatacctttgaagcacctgaggtagtggatgagaaggatttcacagcatatgaaaatacacagaccggtgtgaaggttactcttccggcatgcagtgttgttacacttagattatcgaaataatattaaaacagctattcagaatcccgggttgtctgtcacactaaggtgtgtacggacaacccgggattttccgtttgtgaatgatacaaaaatgcagtggctttttgtgtggatttactatatgttttaatgcataagactctcttatagtgcttcctgaagtatcttcacatcccacttattcatcacatcgccctctttagctgcttctccggtgatcaggtcaaccattcctgcaaggcttgcagggagagcctgcttttcatcagtgaaattcatcacaaagtaaaagcgtgtattttcgctctcgcggcatgtgatttcaagacctgtctcttcagcaatgacacctgatacagacacttcatttgtggcttcatcaagcactcttgcaagtccggctgcctcaagctgtgtggcaacatagtatacatggccttttccgtagctgttttttgtgacagcgggcattcctgcatagaaatcgctttcatatgtggcgagtacttctgcaccttccgggtgcatcaggtcgcacagcagattgcatttatattcttttccatccgaaaagcttacagtgtttgactgctccggtgcgagcgcgtcaatttcctcaacccagacacctgccatctcgcgaagcggtctcggatatccgcccagatgcacgttgtcagactggtccacaataccactcataaatgttgtgatgagagtaccgccgtttttcacaaactgctcaagcttttccttcatgccttcctttaccatgtacagaacaggtgcagcaatcaccttataccttgaaaaatcaccatcaaccggaatcatatcgacagagatatttttgttgtaaaaatactcataatagtggtgaatctggtctacatatttaaggtcctgtgtaggtccgcttgtgtactcaagtgcccagtaattgtcccagtcaaagatgattcccacatctgacttattgcgtgtgccaagtgtttttgtgccgaagctttcaagctccattccaagctgtgctgtttccctgaatacccttgtgtcgtttgttccgacatgtgctattacagcaccgtggaatttctcgcagccacccttgcttcgtctgagctggaagaactggatagtgtctgcgccgtgggctatagtctgatagctctgtgcacgcatctgtcccggacgcttcaatgaattgtagtgctgccagttctgctggcttggagtctgctccatgagcatgaatggctcatccttaagacctcgcatcaggtcgtgagtcatcgcaaccatactccatggtgtgtcgtatgcagggtaattatcccacgaaacgatatccatctccttagcccacttgaaatagtcaaggcccttgaaggtacccatcaggtttgttgtgacaagcgcatcgggaatgatagattttactgcatcgcgctccagcttatagcagttcagcatgctgtcagagtaaaaacgtctgtagtctgttgatattccggcaaagcttgtcatgccgccccatgcctcctcgctgagctcgttaggtacgactatctcatcccagtcgtagaaggtgtgtccccagaactctgtgttccaggcatcatttacagcatcaatggtcttatacttatccttgagccatacacgaaactgcttctggcagttgtcacagtagcagtatccgccgtactcattattgatgtgccatacagaaatatttttattgccgctatagcgttttgcaagctctgtcgcaagagcccttgcgtatttctgatatacaagagaatttgggcagaaattgtgtctggctccaaatttatgacggcgtccctggtagtcggtgctcatcgtctcaggatattttttgaccatccatgcaggcagtgctgctgtagatgttgccatgactatgtcgtagttttcgtttgaaagcatatcaactatctcgtcaagctctgtgaaattatactcattctcagacggctgtattttagcccatgaaaaaacattgattgtggcactgttgatatgggcatccttaaagtaggccatgtcctgcgcccagacctccttaggccactgatttggattgtaatctcctccaaaaaggattcttttgaattttgactgcattttttacctccgttatggtattaaccccaatattatgatattcttaaactataagtgtgtttccttatgcacttatcatataatatatttacggaaaatagtataacatcataaaccaaattatataacattctgaaactaaaccgtttttaaaaggagaaagtatgcctatttattttggaagcaatttcgcaagagaaccgtttcaattcgactctgtcggtaatgactgggagcaggaaagcgtgacgcgcctggaggggtatccgctgtaccattatttacagacgaaggagggtgtgggtgaggtgacggtatacagcagaaatcaggctgtttcagacaatattttgtcaaacagtcatacggttgaactgcaaaaggggcaggggattctcattgctccaaacgtgccacactcctatcataataaaaacatctcatccggcaatagcctgccatggaaaacagagtttgccacttttacagggacaatggcatcagccttcagggaaatgtttgatgaaaaggaataccggctgattgatgagaataaggggatggaggtgtcggaagcgattaacagggcagtggaagactttaaggaacgctccagtgatactcaaatgctctcactcgactgttatggcatcatgcttttgctctcggaccagtctaaccacacacacgatagcgatgaccaaagctatgtgcgttttataaagcccgttataaatgccatagaggaaagctacatggacgatatcagcgctaaggagcttgccgatggtgtatttgtatcgcagcaatatctatcgcgtgtttttacagagtttatgaactgctcggtgtatgagtacctgaccaactatcgcatcaacaaagccaaggaattactgcttataaacagaaggcgcaaggtgcaggatatagcatctgatgtggggtactcagatgccagccattttatcgtcatgttcaagaaatttacagggatgacaccggcgcagtttcggaagctgcatatataagaggatgcaactgtttcttgtatttaatagggtttgatgttaagatatatttatcagaaaatatggtgcgaaaatgaatagctacaattgttttataagaattaggaagtgataatatgagtgatagaaaccggatattatgtgagttcagaaataagacaaaaagcattatgggtgattcgttaaagcagatgatattatatggttcatatgcaagaggagattatggagataattcagatatggatataatggttttgacggagctgacggatgataggattatacagatagaggatgaaatatttgatgcagcttatgatattgaacttgagtatggtgtgccgataagtgtgaatattaaaaatgaaaaacactttaaaaattgggtaaacagcttgccgtattattcaaatatacaaaaggagggaattattattgcttgaggaaaattgtattagtttagcaaaatatagaatggaaacgtcaatggaaactttaaatgttgccagggagtgtttagaaaacaaacattttaaagattctataaatagagcgtattatgcttccttttatgccgcaagagcagtcttagccttggaacgtgttgattttaaaaggcataaggatgttatagcatattttaataaaaattatgttgcaacaggtatatttgatcgtgaaataggaagaaatcttgcaagactaaagcaaaaaagagagcaaagtgattacgatgatttttttattgcatcgaaagaagaagctcaaaaacaatttgataatgcagagagtatagtagctgcaatcattgaatatatgcgtaaaaacaacagtggaaccattatttaagtaagtggttccactgttgtttttgtatatataacatcatctacaatccgtattccatatttatcaaggtcaactctgccgtctatgacctcaatgccatctgctcttagacggttagcctgttcatcggctccgccgaaggcaaaagcccctgacagctcaccctttgcatttaccactctgtagcatggaatttcatcaggattgggattcttgtgcagggcattgccgacagcccggcacatttttttattgcctgcaagctcggcaacctgtgcatatgtggcaacacagccctttggaatccttgttacagcctcatatatgcgtctggtcggattataggtgacaacgtcatagctgtctgcaatcatgttttttatagcgtcatccggcacgctgccatcgagaatgatggtattccagttgtccttgttctgatgccagccggggatgacagatgggaaggcatccctccagaagtcgcgccaggcaggggataccttgacatttaaattgataaaaccattgcgctcataggtccacaggaaaacctttttgctgtcctttatacgcacgagctgccagtttgggtcgtggaatggggcttcctgatatgtatttggaaatgataagccgtagtctaatgcttcttgtcgtgttttcatagattttgcctgctttctttttaggtatacgattacagtataacataaaaagaacaaatttattgacttaattcttcatacaacctctctatctcaccatcttccttagaattaacaaacaccagtgtatcatccgattttatcatgagaataggagagtatccgtcgaatacatacaggctgcattttccaagagtgcgtccttcatacctgccgatatcatagctgtctgtagaggctccgtttgtacgcaggaaactgtcatccggcagctcgtccagaagcttaagctctgtgatgtcatttacatcaatctcgcttgtatagccaccggcagaaatagtaaggttattgtttgtcagagtgattttttcctgtatattaatcaaaggaagcatgcagacaaacaccaggatgatacagccggctattattgcacaggtgattcctgtgaaaatccacgcgccttttttagcataattaaacgtgtaattgccagactgcatgcggttttcaatgagaatatgtttgtcgtcgggattatagtagtagccggttttccagtattcatcatcgtccacatctattggtgaggtgtcgatataaacctttttgcgttgggcttctataatccatccgttttgtattttcagagcatacattttccggtgggagctgtttggaatatgaatgattccaaatatatatgcaaacatccagataatatataccagaacaaaaacggcaatgttaaaaaaaacaataaagcatatcgcaatggagataatcacattggcaatctgaaagtgtttcattttgcgttttccggtggtgacgatttcggctacttcggcatcttctttgtgagatgatggaatatgtacattgagatacatgccattttcatatttataggcgtgtgtgtacgcaaattgcatacatagtatgataataagatttgtaattataaagataataaacatcataatttccatagtctgcctcctctgctaagcggtacatggtttcatttgtgaatatattttatcacacattgataaaaattcctcacggctcattccggtgagacaggcctcagcacttaaaagctcaagctctgattccagcttttcagtgaaatcggtatcatctgcgatggattctgacacaaaagcgccgagccgtctgtctgtgcggataaatccctcatttttcaaaatctggtaggctttattgaccgtcattgtgttcacaccggcatcgcttgccagctggcgcacggtcggaagcttttcgccggtctttagctcgcctttgcctattccctttacaatctggtttctaagctgtacgtatatcggggtgctgcttgacatgtcgagttctattatcatgtgaacctcctgtatcttactgtttataggtcatagcctgtttgaaatgcatcagtatttatgagcaggctgtaatctgacaaaacttgtaagtgatataattgtattgtttgtattatacacagtaatacagacaaccatttatgtcaactgatgttttagcatcaattatattgacatttggaatattacaattatgattaaagagttataaggtatcacaacgtaaaagaatacgatagtgtcaaatgacctatgaaaaaa

SEQ ID NO: 1511 - DNA, 15617 bp, Unknown
  gut microbiota DNA sequence
taggagaagtattatactcatattcgaagctataccattgacttcaaacattgtaattctccttataattctggcataaatcccccttttataaatacattttgataattcaatcatatcaaaaatttataaaaattacaattataaataaactttaacactttaaacctttaaatgaaaaaagtgcttgcgcatgtcttataaaagagttatcatagtacaaaacgaaacacttaggaggatttacaatggaaaagcgtatttcaggtcacacaggcttattagcactcataggatcaccggtcggtcattctggttcaccggctatgtacaattacagttttgaaaaactcggtctggactatgcatacgttgcatttgatataaaagaagacaaggttaaggatgctattgcagcaatgaagaccttcaacatgcgtggatgtaatgtgactatgcctgataaggtagaggctgcaaagtacatggacgagctttcaccggcagcccggattatcggagccataaacactatagtaaatgacaacggcaagcttacaggatacatcacagatggtgagggattcgtacacaacttaaaggatcacggaattgacatcaaaggcaagaaaatcacagttgccggaggcggcggagccgctacagctatccaggtgcagtgcgcattggacggagctcgtgagattactattttcaacaaaaatgatgccttcttcgagcgtacactacagactgcagagaagatcaaaaaagcagttcccgaatgtgttgtaaatgtatacgatattgatgatacagccaagatgacagaggaaatccagtcaagcgatatctttgcaaatgcaacaatcgttggcatgaagcctctggatgatcagagcgtggtaaaagatctttcagctttcagaccggggcttgtagttgcagatgcagtttacaatccggaggagacaaagcttcttcgtgaagcaaaagaggcaggctgcacatgcgtaggcggaaagggaatgctcttatggcagggcgtcgccgcattcaagctttacacaggacaggatatgccggttgatgatgtgaagaaactgttcttcagctagatttaagttcttattacaatattattagatagcttcctgttatacaggaatatgataaaacaacagctcgcggtttcacgcgagctgttgttttttaggagtttttataggtttattattttaaaggagaatttataaataatcgtgacgggcaagcacgtttaagatatttctaccttcctctgtaccctcgatgattctgcgggcacgcttgctgtctccgatatttacgatttcaacattggtatcactgaaagcctcatcaatctctgaaagaacaggtgtgttggctctcataccaaggcagatgaatccataatcaaatgggatttcctcaatctcaccctctggattctttacgatgaaacggtcattcttaacctcctgcagagcagtgttggtcatctgttttacaccgtattttgccatttttgcgtttgtgtcacactttgtgacagggtcaagtccgtttccaatcattggaagcatctcaaccattgttacctctgcgcctctttctgtgaagaattccatcacgtcaagacctacggcaccaccgccgatgatggcgattttctgtcccttcatatcctccggatactcgttgatgcgctcaatcattttaaggactgtagctacgtttgagccatccttgtcaacgaggtcgtgaagacctgtgataggtgggagagtaggtacagagcctgttgcgtttacaatgatatcaggatttaaggcctttaccatatcaactgttgctgttgtattcttgaaaacaaacaggttgtgaagcttgcctgcgcggtgaatcatgtagttagggaagtcagcaagacgcttcttgtcaggaatcctagagataactgatgcaagaccgccaagctcagcttttttctcaataaggaaagtggtacatccaacctctgctgctgtacatgctgcctcaagacctgctgtaccaccaccgattacaactacgttgcaaggcttgtttacctttgtcttcatgtaatcctcaccgctgtttacggcagggttaactgtacagcggattggctggttgagaccgattctgtgtcctgcgcatccgatgttacatgagatacattttctgatatcgcacacatttccgaattccaccttgttaacccactcaggatcagcgataagtccacggcccataccgatgaaatcagcatcgcctcctgcaaggatatcctcggctacctgtgggtcacggatatttcctactgtgatacatggcttgttgtatttctcttttacagcctttgccatgaatgagcgccatccgtcaggtaagtagtttgcatcaatctggtactggatagatccgttaagaccggcagatacgtcgaatacgtctacctccttctcgaagtactgtaagtactcaagtgtatcctcaagagtatttccaccttccataagctcgtcggcactgatacggacgaagatagggaagaaaggtccaacctgcttacgaacctcctcgataaccagctttgcaaatcttgcacggttttctgcagagccgccgaactcgtcagttctcttgtttgtgataggtgaaaggaactggctgatgaggtaagagtgacctgcgtggatttcaacagcgtcgaagccgcagatctgggcacgcttggctgcttcaccgtatttctttacgatgtgcatgatttcatccttctctagtggtcttgggatttccccgcctgcctttgaaggtacgtctgatgcagatacaggctgcattccgatacgtgagctcattgcagaagcaccggcgtgatttaactgtatcgcgatacatgcaccgtgcttgtgaacactctcgcagagcttgaagagtcttggaatgtagttgtccaaatcaatacgaagctgtgtagttccgtttgaaccctgtggagagtcaacgcttgcattctcaacgatgatgagacctgtgccgccctttgctctctgctcatagtagttgatgtggagaaagctcatttctccgttctgctcaccgtagttagttcccattggagtcatgacgatacggttttttactgtcattctgcgaactgtaattggctcaaaaatatgtggatatttgtttttcatagttttttctccttaatctgctaaccgggtgggcacacggtggtgtaaattgctctcattacattatagttttatttcttaaactgattgtcaatattttaatcaaaggctgttatatatgttacgttcaaggtacagcaaaaatgtataaatgtccaatgcatcttttatacgaaatctatagtttttgtctatcaaatggtgtatattatttctagactaaataaagatattaaatacacagggggtgtactatgaatctgagtcaattgcagtacttcaaggtactggcgcaggaagaacattatacaagggcggcacagatgctgtcgattacgcagccgtctttaagtcatgcaatctcacagcttgagcaggagcttggcacacgtttgtttgagaaaaagggaagaaacgtcgtgctgaccagatatgggaagatgtttctgccgtatgttgaggaatcattaaaggtgctcaacgagggtgtgcagcgtattcaggaggtcaatggcagcaggcatggaatcatacatctggcatatatatatacgatgggaagtgagttcgcgccaaagctggtgcgtaaatttctcgacgcataccccgattatgatatagaatttcattttacggttggaacaaccggtgaaattatagatggactaaaggatgacaaatatgacatagttttttcttcttataaggatggggaacaggatatagattttaagaagattgcgaatcagaagcttgtgcttgcagtgcccatggaccatccgctttccataaaggacagtgtggatttgcgggacacaatagagtatccgcagatttattttgagaagggcagcggtctgcgtccggtcattgaccagatgtttgaggagataggacagtttccgaaggtatccttcgagatggaggaggattcgagtatggcagggctcgtggcacagggctttggaatagctgtgatgcctgatattccaatacttcggtcgctttctgtaaagacgcttgatatatacaatcctccttatgagagagcagtgtatctggcaacgcttaagcagagatatttatcaccggttgcgaaggcatttatcaggtttgtgatcgaggagactgcctagctgcagctttcccgcacaaactctatgaagcgcttgatagccggaagctggtatttgcctgtcatgtagcccatgtatacagtgtgtgagaatgactcatgcgatacgaggtggcgtatgcagatgtcatcgcggtgaattgcgtcgacatctgcgacaagcgcaatgccaaagccctgcgccacgagggaggcgatgccgttctcatcgggtgactcacatatgaagtttggcgatacatcatgcttcttgaaaaagcttctggtgtacttgccaaggcctgagtgtctggcatagcctagcacgggatagtcagcgaaatcagtggcttccatggtatccttaagtgtcagtgggtggccgggaggcagtatggcaactatttcctgccttataataggaacaaaatcaataccattttcatctggcgagtatgaaccgaaaattatgtcatacctgcctttttttaatccctcaatattcacagaggtgatgtcctgaaagaaattgaacgtgatatttttattttccttttcggtgaggaaagagcgcacgatagttgggataaacacctttgcaagaggtgatacgtaggcgatatcgatgtgtccgccgtcggttgcaatctggtgcattttgttctcggctctctttacatcgtccagaatagtagacacgtgttctaaaaaaatctccccggccttggtcagtattacattcctgcctctcttttcaaacaaagtgacgccaagttcgtcctctaaagcagctatcgaacggctgaggcttggctctgtgatattcattttttcggcagcctgattgaagtgttccagaactgccgcctggtaaaaataacttaattgattgagtgtcatgtataaatctccataaaataatagatatagtctatgaattacaaatgttatagcctaaatttgtgcatattataacatgattagtacagtaatgctattaaaaaataacaaaataagcattggaagtaccaaaaataatgcgttataatatcattatcaaaggttgttaagtttttaacgaagtgggcatcgttgaaaacatagctaagtaaaatacgaataatcaatattatgacatttaaaaatgaaggagatttaatcatggcagagagaatcacaggacacacagaactcatcggacttatggcttacccaatcagacattcaagctcaccggcaatgcacaatgaggcatttgcatatcttggacttgactacgcttatcttgcatttgaggttgacaacaacactcttgaggatgcggttaagggaatcagagcattaaagcttgtaggctctaatgtatcaatgccaaacaagacagttgtaggacagtacttagacaagctttcacctgcagcagagctttgcggagctgtaaatacaatagtaaacgagaacggagtactcacaggacacatcacagacggtatcggcttcatgcaggcgctcaaggataacgacatcgatgttatcggaaagaagatgacaatcgcaggagcaggcggagctgctacagctatcgagattcaggcagcacttgacggtgttaaggaaatctcaatcttcaacatccatgacaagttctgggcaaacgctgaagagaccgttagaaagatcaacgagaagacagactgcaaggctactctttacgaccttgatgacaaggagaagttaagagaagagatggctgattcctacatcttcgtaaacggaacaggtgttggcatgaagccgctcgagggaatgtctgtagtacctgacaaatcattcttccgtcctgagcttatcgtaattgacgtaccttactctccacttgagacaaagatgcgttctatggcaaaagaggtgggctgcaagacaatgaacggtcttggaatgatgcttttccagggagcagcagccttcaaactctggacaggaaaagatatgccaatcgagcatatgaaggaagtattaaacatcagatatgatgattaatcagccgtagaaattaaatcacattgaattattttgacagaaattaaggagaacactgatgaataaaaaatatttacctagcgcattaatcctttacttaaactactttatacacggagtgggctgctctatcctcggacaggcagtcatcaaggaggctctcgcagcttcatggggagtgcaggttatggctatcacagctatttcggcagcccttggacttggacgtcttatcgcacttccgtttgcaggccctttatcagataagctcggacgccgtatttcaacagcaatcggaagcggctcttatgctatctacctgatcggacttgctcttgcattcaatgcaggaacacatggtggataccagattgcttatatctgtgctatcattggcggtattgcaaactcattccttgatacaggaatttaccctgcagtatcagaaatcatctacaaagcaccgggtgttgcgacaatgggaatcaaattcttcatcgctatcgcacagatgcttttaccattcgtacttggtatgacagttgctacaacagcagcaggacttacatcatacaacacactgttcttcggatgtggaatcatctacattgtacttttagtattagtaatgatcttcccgcttcctgatagcgatgcaaaggcagagggaaagaaagaaggacttatcgcaagcttaaagcacacacatttttctgttgagtcaatcgcaatgattatcattggatttacatgtacaggaaccttccagttatggctcaactgtgcacagaactttgcaaaagagaacgtaggctgggctgatccttcagttatgcagtcatactactcagcaggaaccatgatagctcttatcgtaacagctcttttaacaagaaaaatcaaggacgttagatttatccttgtttaccctgtaatctgtcttgcaacaatggtagttgtgttagccggacagacaaagccactcatgatcgcaggtgcattcatcatcggatgggcaggagcaggcggacttttacagattgtaacatctgtatgcaacatgctcttccctaagataaagggaacagtaacagcgctcgtaatgatcgcttcatcactttgcaactacacaatcctcacagcagcatcaaagatgcagccatcacaggttatggtaatgaacatcgtgcttacagcaatcggcgtggtgcttggattattcgtaaacctgcgctatactaagatggtagagctgtctaaagaggattaaaacgttactcaaacttcccatactatgggagccggcctagcatacagtgtattcctcagaaaaaatatgaagttaaccacgcggcaaatatagttttatgtatggaatgtattggtacattaaattatactggggagtataattatcatacagctaaagtagaaaggaaaaaatcatgaacaccattaaggtaagagatattgaaatcggtgcaggcgcaccaaaaatcatcgttcctatcgtaggcgttacaaaagatgacataatcgcagaggcaaagacatttgattctatccctgttgatatggtcgagtggcgtgttgactggttcgagaatgtattcgagtttgacaaggttgaggaagtattaaaggagcttcgtgatgctctcggaaatattccaatccttatgacattccgtacttcaaaagagggcggagagaaagcaatcgagcctgaggcttatgccaagcttaacatccaggctgcacagacaggatacgttgattttgtagatgtagagattttcacaggcgatgagattgtaaagaaaatcatcgatggcgtacatgctgcaggcgcaagagttatcgcttcaaaccatgacttcttcaagactcctgcacagtctgatatcgtttacagacttcgcaagatgcaggatatgggagctgatatccctaagattgcagttatgccacagaataagcgtgacgtgctcacacttcttgctgctacagaggaaatggttacagattacgctgacagaccaatcatcacaatgtcaatggcgggcacaggtgttatcagccgtctctgcggtgaggtattcggatcttcaatgacattcggtgccgctaaaaaggcatcagctccgggacagatgggagttgaggatctgtctacagtacttggattacttcataagagtatgtaattgattgtgcattaagtaaaagcctgttgcatgtaaaagtgtgacaggttttttattaaaatatcgcaaatgtgaaggtactgaacagttgcgaaagattaaagaattttggcatataataattagaaaaatcgtaaatggtttgctaaaataaaaacatatttccgaaggaaggggatattacatgaagaaaattttacattatttggatgaatatcttgaagaatttctgatggtcattttccttatagcgatgacacttataatggggattcaggtgttttccagatacgtccttggcatgtcgctttcatggtctgaggaaatcacaagatacctgtttatctggtcggcatttttgagtgttagtctttgcacacgtaaatgcatatccataaagatagaccagtttatacagctttttccacgaagaggaaaatcgctctggaaggtattaaatctgacagttgagtttgtttttttcgtatatctgataccgtattcattcatatatctgaaaaatacgatagaaagcggtcaggtgagtcctgcctgcggtatccctatgtactatgtgcaggcggcaccgtttgtatgctttataatcacggctttccgcatcgcgcagagatggtttggcgagtggaaaattgtcttgaaaaaagatgaaaagcctcttgaagagggtagtatcgcctcggttatcgaggaagccgttgttgaagattcttaccgcgagaaagagctcgtggaggagattgaagcaattgacagtaaagctaaaaaaagaaaggaaaaatagatgtcagcagtagtagtttttatattgttcgtaatatgtcttattatcgcgattccggtatctatttcccttggaatagtggcagtgctgccgggtgcgtttgactcatcttttacagccagcgcaagctatgtcatccgctccatgctcggaggaatcgacagcttcccgcttttagcggtgcccatgtttgtgcttgccggaatcgtcatggcacatggcaaaatctcacaaaaattgtttgatgtttttgtgtattttataggaaaaagaactgcaggaatcccatgtgcggttatcatcacatgcctgttctacggagctatctcaggttcagcacctgcaaccgtagctgcagtcggaagcatgaccataccgcttcttatggagcttggatacaaaaaggatttttcaacggcgattgttgcggttgcgggaggactcggagttatcattccaccgagtattccgtttatcatgtacgcgatggcaaccggtgagtcggtcagtgatctatttctggcaggaatcattccgggacttttgataggagcgcttctcatgttttatgcatattaccactgcaagcgctatggagaggacaaggaaaagataaatgcaaaggtctcagagcttagaagcaagggaatttttagcatattgaaggacagtatatgggcacttttgagcccggttatagtgcttggatgtatttatgccggtatagcttcgcctacagaggcagcggtgatttcggtattctatgcgctttttgtaagtctttttatttacaaatccataaaggtaaaagagatatggggcatcatggtggaggcgatgaaaacctatgcacctatactgtttattcttgccgcatcgaccgcgttttcacgtgtgctcacactcatgcaggtgccacagacagttagcgcatggatacttgcacattttacaaacgagatagtacttcttattgttataaatgtgttcctgcttatcgtgggaatggttatggataccacaccggctatccttatattaagtccgattctgcttccaatcgtgcagagcatcggcatgaaccctatccatttcggagtagtgatgatcgtaaaccttgcaatcggtttcgttacacctccaatcggtgtaaacctatttgtggcaagctcactgacggatgtaccggttatgcggattgcaaagaaggcggcgcctatgataggatatttcctgctggcactgctgatacttacatttgtaccggcgattagtctcttcctcctgtagtatataatgtactctcggaatcattgattagtaaatttcgggagagcatttgaggtatagcgttttttaattaactacaccacactaggaaaacagtaattaatcataaaatggagaaaaatatgagtagatttggcttgtttttatgtaaaaaagctggtaaatataataaaccgcgtaaatcgtatagcaaatatagattgtggagaagagcagcagccgtcatgatgataatttcgcttacagcaggacttgccgcgtgcggtggctctgctggtgaaggctcgcaggccgcagctaaggatgcaggggtgcagcgctatgcatggcctctcggcagctcaagcccggaggacaccgttacacagatttatgcggagaagtttgccgatgaagttgacagattaagcgatggcaagatgaaaataaatgtttatccgaacagtgtgctcggtggagacagggagctgcttgagtcctgcaaggatggagatataccatttgtagtgcaaaacactgcaccgcaggttacatttatgaaggatactgcagtatttgatatgcccgcactttttgacaatattgatgaggtgcgtgagcatgtggacaatccaaagtttatgaagctaatgcagcaggtctacaatgacgccggctatgagcttttgggctatgcagaccagggcttccgcgtcatgacaacaaacaaaaagatagaaagccttgctgattttaaaggtcagaaaatccgtaccatggaaaactcttatcatatggcatattggaaggcactcggagcaagccctacacctatgaccttctcagaggtgtatatcggcttgcagcagggcactatagatgcgcaggagaatccgtatgaggtaatcgtatccaacaagctttacgagcagcaggattatgtagtggagacaaatcatctgccacatctgatatcgctcatagtaagcgaggagttcatgaaaggactgacagatgagcagcagcagattatccgtgaggcagccgagacagcgaaacagtatgccagagagcagtctgacgagcggattgcctcaaaaatcaagacaatcgaggatagcggcacacaaatcatcactttaagcgatgaagtgcatgagcagattcgcaaggagtgtcagccgatatatgaatcgattaagaaaaatgtgtcgtctgatattgtggatgcatatctgacacaataacactttaaagcattaaaatattttgcttgataaattggtaaagtcttgttatactatgactaagaaatttgtggttatcaaaaaagagaaataatataatatgaagttataataaatataatttgacgatatttcgcttaaatacctaaatccaatatgaaaaccacacataagtaaggagacacaccatggacaaaatcgaggaaatccgcgcaaagattggagaatgtgacgatataataattaagcagcttgcagtcagaatgtcacacattcaggaaattatatcatacaagaaggcaacaggaatcccaatcttacagccggagcaggagaaaaagcagacagatgcacttgcggcaaagcttggagacaatgaatttgaggaagagatacttgatattttcaagtatatcatgaagaacagccgtcgtatccaggcaaagagccttttcgattacaatatcttcctgatcggtttcatgggtgcaggaaaaagcactgtagcaggagaattaaaggataagctcgagatggaccgtgtcgagatggatcagatgattgttgagaatcgtggcatgtcaatttcagaaatatttgatgagttcggtgaggcatatttcagaaacttagagagcaacacacttatagagcttcagaagagaaagcagaccatcgtttcctgcggtggtggtgttgtcatgagagaggaaaactcagatcatatgaagaaaaacggccgtgtagttcttcttacagcaaagcctgagactatctacgagcgagtaaaggatagtgacgagcgccctatactaaacggcaacatgaatgttgagtatatcagcggccttatggaaaagcgaaaggagcgctatgaggcggtggcagatgtaacagttgccacagatggtaagaatgtcacacagatatgcgaggaaatcattgcaaagcttatcgcacttgataatgagcaggacaaaaaacaggcataatacgggaatagcacagcacatattaaggcagcagccggatatcagaccggctgttgctttttgttcaaatactttaggggtgtgttgcttgaaataattgcaaatatgatgtatagtactctacaatttaagagatactgattaagtatggcagcataacaaggaggtcataattatgtgtacagcagcagcttataaaacaaaggatttctattttggaagaacactcgattacgaattttcatatggagatgagattgcggtaacaccacgaaactatgtgtttgatttcaggcatgcgggaaagcttgaaaaccattatgcaatcattggaatggcacatgtggcaggtgactatcctctttactatgatgccataaatgaaaagggactgggtatggcaggactgaatttcgtgggaaatgcagcgtatgcggcagcagacgaaaacagctcatgcgagaacggcacatgcagcatcgcaaagacaaaggtggcacagtttgagtttataccgtggatactgtcactatgcgctacagtagcggaagcaaaggaaaaattaaatcgtattttactggtagatacaccatttagcagtcagcttccggttgcacagcttcactggattatagccgacaaaaatgagtgcattgtggtggagtcgatggcagacggtatgcatgtttacgacaatccggtaggtgtgctcacaaacaatccgccattcccatatcagatggctgcactcaataattacagaggcttatccacaaagcagcctgaaaatacatttgcaccgggagtggagcttagtgcatacagccgcggaatgggaggcctgggactgccgggagatttatcatcgcagtcacgctttgtacgtgtggcattcacaaagctaaactccaaatcggatgacagtgagaatgcaagtgtgagccagttcttccacatattaggctctgtggaccagcagagaggtctgtgcgaggtgacagagggcaaatatgagattacgctctatacctcatgctgcaactgcgacaagggaatctactattacaccacatatgacaatagccagatcacagcggtagacatgaacagggagaatcttgatgagaagctgcttatcagatatcctgttattacggagggaaagatttgttggcagaattagagaatctgtttgcgctacaggataaaaattacagggaatttcatgcgaggcttatgcccaatattgaaaaagaccgcataataggaataagagtcccggtgcttagaaagtacgcaaaggagcttgctcatggtagcaggctctttttgtcggttcaaaaagaaaaacgggtctgtaatacagtgaaggaaaatgactgtgacaatgtggaaaagtttctaaatactctgccacattactactatgaggaaaataacctgcatatgtttctgattatgcagatgaaggattatgatacggcattggcttatctggaagcattcctgccatacatagacaactgggcgacctgcgacagtggcgtaccggctgtgttcaaaaagcacaaaaatgagcttattttgcatgtatatgagtggctggattcggataagccctacaccgtcaggtatggcattggcactttgatgcgcctatatctcgatgaggattttgatataaaatatgctttagatgtggcaaaaatccgttccaaggagtattatgtaaacatgatgaaggcgtggtatatcgctacggcacttgcaaagcagtatgatgcagtgctgccgatactgcaggaaaggcttatggatagctggagtcacaacaaggcgatacaaaaggcgcgtgagagttatcgcatcacgccacagcagaaggagtatctgagcacattaaaggtttaatgaaaagagacaaaatttatgaaaataaaaagcttatttgaatcaaaatttataaaggtgtttgaccttcagtaccaagagggcaggcattattataatgccacaaggagagatgaagaagaccttgtagccgccaaatccacagaggagttcaagaaaatgcttccggatgcggtgagctgcgtggtgatatggaatccgtcagatgatgacgagaaatcaggtcatgagccatgtctgttaatgaaccgcgagttccgatatccgacaggtcagtacctgctcagcgtaccggcagggcttattgacccggaggattgcaccggggataatgataataccgcgtcacttataaaaactgccatgcgtgagcttcttgaggagaccggccttaaagtgacagaaaaagatacggtttctgtaatcaatccatgtcttttcagtacaccgggcatgacagatgaaagtaacgcccttgtaaagattgtacttaaccgcgatagccttaatggaatgtcgcaggagggcgcagtgggtggcgagctctttgacggattcgaccttctgactaaggcgcaggcgaagaagatacttgaggatggagtggatgagcacggcatatactattctgtgtatacatgggctgcactcacatattttgtggcagatttgtggaggtagatgtggaatgtagcgtggttagccagggaggcggccatatgctctcgtagagcgactagttaagctgtttagagtctgtagaattatgccctggtgccatagt

SEQ ID NO: 1512 - DNA, 2898 bp, Unknown
  gut microbiota DNA sequence
tgctaatttagtcctcactaaatgttttgatataaaattgtacctaatctaagcacacagattcactctcagactgattgcggacatctgtgatactgacttggattttcggttttgatataacagcgctgccttatctaccgctaaattggtataaaaataaggactaaattaggcataaccccttgattttactgggtttcatctaacttggtcctattataactcaaacaccacgctgccacttgtaaacggcctgcgttgattcgaagcccatatactccgcaacatcaatcacccttaggttattgtccttgcggagctagttgattcgttctccggtagctttaatatctaatactggataattcatataaatgcctccttgtgtaaattcgttcagtacgtcacttactaattacaacatcctctgcatacgcatcagacaccgctgtttttctatggatgtaaggctattattatcgattgctacgttttgtgtggtgttataatacatcaatttattttatttgtaaagatttttcgttgtcaccgatttaaaaacaaccatatcgttgcgtttgaattttggcattccgataatcctgaaacacctccattatcagtctccctctatcaatctgaatgtcttatagtttgtatcgtcctgtgggctgcagtatatcgcaaactcgatatttttaaatgcatgcatataatctttaatcacattttttgcagcatatgcaacgatatttgctttattcataaaagctccacatccaaatgctccaagtattactgtatcatttccttcagaaacggcaacatccagtatgcgtcttaatctcttctcatgtatttcaagcatttccttatcgctgatttttgctgcctttttgccatcgcctgtattatgtttattgcttggcatggctcttaaattcggtgctgcgcaagtaattacatttaccttataccactcattctcgggcaataaagccgggttatttgtatcgcttttaaataccgttacctccggtgtataaatgatatcgtcgttatgtaatggatttattgcctgcttatgaggtgtataaaatccatcccacatatcaggtgaattcagacagaaataaagatatgaacacctgcacagacactcctcctgggctgttgaacctcttacaacacctccgcccggatttgaagcagaggcaaaattgtgtactgctaccttattatctctatatgcctttgcagcctcaaacgttctcttctttgaaacaatcacttttgcaggctcatcatatatatttagattcggtttctccaaagcatctgtttccaatattagtttctgtccgcttgcagatgtctttaagtcagcattaagctttccattcgttttgcttaatctctctgtatcctgaaatattaatacattttcttctcttcccataatgattctccatttctttaaaaaatgcctgtattaccagcattttctatgccatagctgtctctccttccattataccttacaattccgtctactgttaattttattttcttcatcctgttttttcaataaacctgtggtttacttttttcatgtcagttcttgctgacataatgataatacaccaacttcgagaaactattttcatgagaagtttacaccttatttcaagcaaagtatttcatacttcaatggacagcaaaaaagccctgtccttacgaacagagccctatgcattattttgcacttacaagccttactatcacatcaattccagccgcccaaaagagtatcgcccccacgatatatacctttgtcttctgctcaaaaccgaagtgatatcctgtgtaaatgcctgccactatacagatgacagtgagcaacgccaccattatcataatggtgaaaagtccagtaccgaggaagccgaatgctattcctgcaagaaccgtataaaatgcggtgattcctgctatccttagcacccttttcatgtcaagctgcgcctgacaatgctcctcaatcctttcgtttcttatagcctttcctataagcctgatccccagtcctatcagtattccgatagaaattatctctcctaaaagtgcttcatccttcaccgaatatttcccattaagaaagcttgacagaaaatatccgatgtacattgctaacaactggcaaactgcaactatgaagcaaatggctgtaagctgttttttatttactttttggatcagggatccctgacattccatcgcaacgaaaatctccagtgagcttcccgccacgattaacagatattctatccagcccatttttgcctcccctaatctttaaacatcctttaattaattatttgtcgctatctgccttagcatctattgaagctaatttatatatgaacttaacgctgcccgtctgtccatcagcgattgctgagtatgtctgatattcctcacctgcgtcaattactgcctgaagcttgtcggtgaatggctttaagtcgccgttgtatgcgtcgagaatcttgttgattccttcctcattgaactgtaccataccgtctgcaagtgtgtgtgcaccgtctgcaagtgtcttagagcctgttgtgagctggtcaacacctgaaactatctgatttgttccatctgcaagctgtgatgctccgctattgagctgtgcattgtttgctacaagtgtgtttgaaccgtctacaagctgcttgataccacttgtgagagttggtactgagttcatgagtgactgtgttccggctgaaagctggcttgctccggcattgagtgctgttgctccggcatttaatgtatcgttgtttgctgtaagctttgctgctccggcgctaagctgagacg

SEQ ID NO: 1513 - DNA, 20446 bp, Unknown
  gut microbiota DNA sequence
gaacaataaaatgggtagtttttgacactaccaagaatacatatgaggttaaaaaatgagcagattaatagagcagataaaacaaaaggatgcctgtgcctttacacatggcggcaaatttcatgcagatgatgtgttctcatcagccctgcttttgtatataaaccctgagattagcataacaaggggaaacaatgtgccggaggattttagcggaatcgtttttgatatagggcgtggtgagtttgaccatcatcagaaggacagcagaatcagggaaaacggtgtgccgtatgcggcatttggcctgctgtgggaggctgttggagcggatattctaggtgaggagcttgcggtgaaatttgatgagtcatttgtccagccactcgacaacaatgacaacacaggagagaaaaacgagcttgcaacacttataggcaatttcaatccgtcatgggattatgagggtggcagcgatgaggctttctttcaggcggtaagcgtagcaggcatgatactggaaaacaaatttgagagataccgtggcaatgagagagccgataagagagtggaggaggtgcttgcaaagcacgatccggcaagcagaatactggtgctcccggagtttataccgtgtcagaaggctctgagtgagacggatattgcgtttgttatttttccgtcaaacagaggtggcttttgtatacagccgcagaaaagagaatactcgatgaattacaagtgttcttttccggcagagtggctggggcttgaaggtgaggaacttgtaaatgctacaggaattcccggtgcgatattctgtcataagggaggctttatcatgactgtaaaggagcaggatgaagctgtaaaggcatgcgaaaaggcgctttctcttcataaagacagctctgtgatagtatggtatggcagtaaaggagatactgcagcgaaggcatgtgacagtcagactaacgagcagcttatgaatgttgcaaaggcacgaggcataaagggtgtgcatatctgccatgttgatgcaatgcctgttgcgcagcttgaattaacagagcttgacagtgagacagcatatgcagaggtgctgatggagaagccacagtggaaggcatatgtaaaggagcaggtaaagtgtattttgaagtacagaccggaggcagtgtatgtggaaggaaacgcatttgagacgtatcctgttatacgtgcactcagaaaaaagcacattcctgtgcttacgatgattgaaaataaagagaaaaaaataatggtaagaataccatgatttatgtgcatttttgaaaaaatttggtataatgttgttaagcgcggacatcgtgcagttttgcgaatgtgtgtggtggttttgaataatacgggtaatatacaagtaacaatacgaggatgcagcaggtatgaagacaatcataaaatacgagcttgttataaataaggcactcagatctgcactcaactatgatacaccggatgagcagattaatgagtttatcagatttttcggaaaacacatcggttctgaccgcatatatatatttgaggattgtgatgagaagcatgttaccaacaatacatatgagtggtgtgcggatggaatagtgccggagatacatgaattgcagaatgtcgatatggacataataggctggtggtatcaggcatttgacaatgaaaaaaatatcatcatcacagatatagagcagataaaggatgagcacaagggctcttacaatctgttaaaggcacaaaatgtaaaaaacctggtggtatgcccaatccgctacaaggatgagataaagggctttttcggtgtggataatccaccggaaagtgatactctcggactgaccacattcctggatatgataggaaccctgctcatatcattgcttaagctgcgcaattccttcacaaagtcgaataaggaagcgaagcttagcagctattcatcgctttcaagcatctatatatccatggcactggtaaatgtgcagacacgtagataccatatagtaaagactttggatgaggttacacactttttgggcgtgaagccacagaaagagggagagtataggatagatgaggatttcccggggcatataaacagtgtgatgaatgagttctgtactaaggcacagcgcaaagagacacttgaatttgtggatatcagtactgtagaggacagacttcgtggaaaaaataccatagtgcacgagtttatcggaaaggtatcaggctggtgccgtgaaaggtttattcctgtagactatgatgcagatggcaggctgtggcatgtgctttactgcgtggagaatattgatgaggaaaagcgacgtgaaaacaggcttatgtatctggcacagattgatttgatgacaggtatacgcaaccgcggaagtggagagaataagataacagagtatctcgtccgcaaacagtgcggtctgttatgccttttagactgtgacaagtttaaggcaataaacgatacctatggacatgcggtaggtgacaaggtgataatagcaattgctgatactctgcgcaaatcatgtcgtgatgatgatgtcgtgcttcgcctgggcggggatgagtttgcggtatttataccggggatgcttgataaagagcgggcagaagctttttttgacaggcttttttcaaacatagagcatattgatatagcagagatgaatggaaagcatatactgctcagtctgggcgcatgcttttatgacggaatggattgtatcacgtttgaccagctctacagaagggcagacaccgccatgtatgacagcaagaaaaaacagggctacagtgcgacaatttttgatgcaaagcaatgatagtccggcatattaaataaaaagaggagaatgaaaatgcagacaggaaaagcaatatctattccatcaatcctcaaggtgggaaatggaacattaaacaaaatcggagagtatttaaagagtgaggagctgacgagcgtagtcatttttatgggaaacggtctcatagatatgtttggagatactataatgaagtcgcttactgatgccggtatcacagtgcttgagtacagtgagcttgatacagttgagatagacgatatcatcacccttgcatttgatataccaaacaaggcaaaggcagtcgtgtcagttggcggcggaaaggtaatagatgcaggaaaatatgcagcttttctaagaaatatgccatttatcagtgtgccgacctcaagctcaagcgatggtttttctagcgccagtgcatcacttttggtgcacggcaagcgtacgtcggttcctgcaaagcttgcgcatggtatcatagttgatacacaggtcatccgcacagcaccggagaagtttatatattcaggcatcggggatatggtgtcaaagattacagcactctatgactggatttttgaggaagcacatggtgcaggcgtggtcaatgactttgccgtgatggttgctaaaaaggcggtcaacagctttgtgcgtacaccttatgagagcataaaggatgagcttttcctaaaggagcttgtggattcacttgccatgagcggcatagcaaacgagatagcgggaagcagtgcgcctaccagcggcagcgagcatcttatttcacatgcgcttgacaaaattcttgagcatccacagcttcatggcatacaggtcggcatagcaacctatatcatgagtgtggtgcagaaccacagatatgtaagggtgtgcacagtgctcaaaaggacaggctttttcgactatgcggccactcttggcatgagaaaacaggattttttggatgcgatagatatggcgccatccatgaagccgttcagacacacatatctgcatgagaaggagtaccgcgatgcggcaaagaagcttgtgctggaggatgatatactgaataaaatactggtatagagatatgtatgagaagactatagagccggttgcgattatgcataccggatttggagagaaatttggcattccaaggcagagcggcctcgtacctgaggcagcagggcagatagtatttgaaccaaaataccaaaatcccgatgcgcttcgcggaatagaggaattctcgcatttgtggattatatggggcttttccgaaaacagggtggagaaattcacaccgctcgtcacaccacccaggctgggaggcagacaaaagcgaggtgtttttgccacacgttcgccgtttcgcccaaacggcatgggactatcctctgtaaggcttgataaggttgagtacaaaagcagcaagggacccataattcatgtgtctggtgtagatatgcttgatggaacaccaatatatgatataaagccgtatctggcatatgcagactcacattctgaggcatcagatggctttgccgcagagcacagatgggatacggtgcatgttatctggcgcgatgaggcactcaaaagccgtatagatgaagatacccgcattacagtagagcatattctggcacaggatccaagagctgcatacaacaaggcaaaggactatatctatggcatgagatacggcagatttgatatacgctttgtggctgactcacatgccggcacgatagagatagtggatgtcgtggagtgtatagacgggtatcataaggttaagtgattttaggaagtgtttttagtgaatatgatttgcatatgctgtccgaagagagtaaaatggtaatgcatacaaaaggacaaatgcattacgaatatatatgtaaatacatattaaatacacataaggaaggtacatacaatgaaaacagtaaaggactatatcagaactatcccggatttcccggagaagggcatcatgttccgcgatgtgacaagtgttatccaggatgcggatggactaaagcttgcaattgacgagatgataaagaagcttgacggacttgattttgatgtgatagcaggagctgaatcaagaggctttgtttttggcatgccgatagcatatgcgcttcataaaccgtttgtcatggtaagaaaagcaggcaagctgccatgtgagactgtatcaaagacatatgaccttgagtatggcacagcaacaattgagatgcacaaggattctgtaaagccgggtcagaaggtggttctcgtggatgatcttatcgctacaggaggcacaatgcaggcagcagcagagcttgttgaggagcttggaggagaggtcgtgaagatgcttttccttattgagcttgcaggtcttaatggcagaaagcttcttagcaagtatgatgtggacgcagttgtgtcatatgatggcaaatagggctgttatatctgaatgaatatattttatatgtttgtgcatactgacattaattaaatctatgatttgatgagattaagagtaaggagagtcggtatgcagcaaaaattgggaaagtggagtctccgttttacggaggctccttttatattggaaagcagttcggttgtaggcacaaaggaggcggacggaccgcttggaggtctgtttgatattgtaggaaaagatgacaggtttgggcagaatacgtgggaaaaggcagaaagctccatgcagcgcgatgcactcacaatggcccttggaaaagcacatctggatgcatccgacatggactatgtatttgcaggagatctgctcggacagtctatggccacaacctttggtgtggaaaacttccgtattccgtggtttggagtgtatggagcatgctctacatgtggggagtcgctatcacttgccgcggcatttgtggcagcaggatatgcaaggcatgcggtggcagtgacatcgagccactttggcagtgccgaaaagcagtttcgcttccctaaccagtatgccaatcaaagaccggtatccgcgacgtggaccgttacaggaagtgcagcatttattgtgggcagtggagcagttggtaatgaggcatcggtcgggtgtgacaatgcaaatagtatatcaaggaaggtgcagattgagggaatcacaacaggagttgtggtggactatggcataaaggatgccatgaacatgggcgccgccatggctcctgcggcctgtgagctgatagtaaatcacctgagtgatttcggcagaaaggcatcttattacgataggatagtgacaggagaccttggaagcgtcggacagaagatactgattgacctgtgcaggcaaaagggcgtggacataagcaaaaatcacgaggattgtggcatgaagatgtttgatgcaacgaaccagaacacgggctcaggtggttcgggctgtgcgtgctcggcaactgttttgtcggcatattatctgccaaagcttagaagtggtgaattgaagcgtatactttttgtgcctacaggagcacttctttcgcctgtcagcttcaacgagggcgagtcagtaccgggaattgcacacggtgtggtgcttgaagcagtaatgtgaagttgtaatttgaagctgatggcttcacatatataataggatgaatgagatagggtgaacgagccgtttttgagggatgggctgcacgttcaaaaatagaagaaaggcgtaaggatataatggattatgtaaaagcatttgtcgtgggcggtatcatctgcgccatcgtacagattttaatggaaaaaacaaagctcatgccgggcagaattatggtaatgctcgtgtgcacaggagcgctgcttggcgccgtcggcatatacgggccattttcaaagtgggcaggcgccggcgcaaacgtaccgcttttgggctttggaaatgtactgtggaagggtgtgaaggaggcagtggacagcgagggatttataggtctgtttaagggcggctttaaggcctgtgccgtcggagtatcggcagcacttatcttttcgtatatcgcggcactcatcacgaaacctaagttaaagagctgagaataagaaaaactgccacttacatgaatgcatgcatgacgcattagcttttttgttctcagtggttcagaatagttacgaatgatgtataaattacgaaaaattgcccatactatctccaaaacgaaaaggagactgatacaatgaagaaaatgaaatatttattggcactttgcctgatactcgctgctgcaggaagctttgcagcctgtggaaacaatagtaatgtggcagacacctcaatggttgaaaatacacaaagaggtggctctgccgccgacgatgccggtaaagccggcaaggatatcatagatggcgccgggaatgccggcaaggatgtgatagacggagcaggcgatgccggaaaagatgtgatagacggagcaggcgatgccggaaaagatgtgatagacggagcaggtgatgccggtaaggatgtgatagacggtgcaaaggatgccgtagatgatgccggaaacgccataaaaaagagtgttgatggtggaaacaacaactaacagctatttataaaaagaaaacagttactatatatgcttcaatggctgcaaaaacaaaagcaccgacaacgtcgctgataaaatgcacacctgatatcacacggacacaggcaatgatagctgcaaggactgcaagcgcaatgccggtgaaccataaaggcgaagcagcaggtgagcatattaaaacagtaaatgcaattataaatgcagaaaaaacgtgcctgcttggaaaagatctgccgtgtgtgtcctttggaatgacaggcggcatatcaaacttttcgtatgggcgtggcctgtttacgatatatctgaaaacagatactgcaataaagccgacaagcggaactatgattgatagtgcaagcatatgaccggctgtaaagcacagatacagtacgtatacagggtatgtgataaaaactaaataagtgcatattttattgattaattctagcttttgggctgctctgttattttcacggaatggggcagtcatttttatgtacgtattttttttcataattatttaccatcgtttatttaagaaatattgcattgtaaccacctagagtggtgtcaaatacccttgcggtactgcagaggtgtcatgccatagtgctttttgaaggctctgttaaaatatgacaggctttcaaaccccacttcgcctgaaatagaaagcactgagctgtctgagctttgcaaaagtctcgcggccatggtcaggcggtagtcctttaaatagtcaacaaacgatgtgcccatggtttctttaaaatatctcataaaatgagactcggaaaacccggctacatcagcgatatcagcgatagagattttgtcggcataattattttccacatatttgagcacaaccttcatcttattgagtgtctttttactcttaagcggcttagtcagattacggcagcggttatcaagcacaaaaaagaattcgtagagcttgctctttatataaagctgatagccctgcggcatcgtcttgcaaatctcatcgcatgcatctattggagccacgacatcctcgtagtatggatacaccggtgtaaaaaccgtcggaactgtgaatctgccggttaagagaggtgtaagaaaatcctccttggtgtaatcgtactttccgggaagcagcatcgacagggaaaatatgatattttcgtactccatcgattcatccatatattggtctatagagtgaagctgtcccggcagaatcagcacaaggcttggcgctgtgacatggtactccttaaaatccacagatatatgaccgcagcctttctttatatagataagctccatgtcgtcgtgccagtgcagcggaactccggaaaaatcaaggggaatcgagcacaggtaggtattgtatgggaacgtaagctccacatgtgttttgtcttcgtgataattttcatattctaatatattcatgatgatattttagcatattatttcttgaaaagccactaaaaataccgaaaaatgataggattgtgcaagttttcgactgtatactgcaagaattgtgcagtgtaatggattatacttgattcatcaaatgacacaaagaagttaagcacgctaaatgaaaattagttaatttgacacattggcgtgtacacatgataacagatttgggaggaaatcaaaatggcaatcatgcaggaaatcgaaacaaagcttcagaagggaatcagcgttagtacagacgaggaagtatactacgcattacttgagcttgtaaaagacaaggcagagaaaaaggtttcaaacaaaggaaagaaaaagctctactacatctcagcagagttccttatcggaaagcttttatcaaacaaccttatcaacttaggcatctacgatgaagttaaagagactcttgagaagaacggaaagtcacttgctgaaatcgaggaaatcgagcttgagccttcacttggaaatggcggacttggacgtcttgcagcatgcttcatagattcaatcgcaacactcgggctcaacggagacggtgtaggtctcaactaccactacggattattcaagcaggtatttgagaacaatctccagaaggaaactccaaacccatggattacaaaggagagctggcttacaaagacagatatcacatatcctgtaagctttggcggattcacagtacagtcaagactttacgatatcgacgtagttggatacaacaaccgtacaacaaagcttcacttattcgacatcgagtcagttgatgagtcaatcgtaggcgacacaattgatttcgacaaggatgatatcaagaagaaccttacattattcttatatcctgatgattcagatgataagggacgtctccttcgtgtataccagcagtatttcatggtatcaaacgcagcaagacttatccttgcagaggcagaggcaaagggatctaatttacatgaccttgctgattatgcagcagttcagattaacgatacacatccatcaatggttattccagagcttatccgtctccttcaggagaagggcatcctgatggatgaggctattgagattgtatcaaaggtttgtgcatacactaaccacacaatccttgcagaggctcttgagaaatggccaatcagcttcttggagaaggcagttccacagcttatgccaatcatccgtgagcttgacaacaaggttcgcgcaaaggtaactgatgagagcacatacatcatcaaggacggtcttgtacacatggcacacatggatattcatttcggatattctgtaaacggcgttgcatacctccacacagagattttaaagaatacagagctcaataacttctacaagttatatcctgagaagttcaacaacaagacaaacggtatcacattccgtcgttggttaatgtcttgtaacccggagctttcagcatacatcacagagcttatcggtgatggctggaagaaggatgcaaacgagttggagaagcttggcaatttcatcaatgatgacgctgttctcacaaagcttgttgacatcaagaacgcaaagaagacagagcttgcttcttacttaaagaagactcagaatctcgacgtacctgacaattcaatctttgatatccaggttaagagacttcacgagtacaagagacagcagctcaacgtgctttacatcatccgcaagtactttgagatcaaggcaggcaagaagccatctacaccaatcacatgcttcttcggtgcaaaggcagctcctgcatatatcattgcaaaggatatcatccatgcaatcctctgcttacagcagattatcaacaatgatcctgaggtaagtccataccttaaggtattcatggttgagaactacaacgtaacattagctgagaaattattcccggctgcaaatatttcagagcagatttctcttgcttctaaggaggcatcaggaacaggaaacatgaagttcatgcttaacggtgctattacacttggaacaagtgacggagcaaacgtagagatagctgagcttgtcggcgatgagaacatctatgtattcggtgaggattcacagactgttatcgacagatatgagagaggcgattactgctctaaggattactatgacaaggatgcagacttaaagaaggctgttgacttccttgtaagtgatgagatgatgaaggttggttctaaggagaacttagagagactttacaacgagctcctcaacaaagactggttcatgacattcccagactttgaggattactgcaagacaaaagagaaggcttacgctgattatgaggataagaaggcttgggctaagaagatgcttgttaacatcagcaaggctggtttcttctcttctgacagaacaatcaagcagtacaatgatgagatctggcatttagaggtttagaatttttcttcctcctttaaatacaaattgggcttaagaactcctgcgggtgcatcccgcaggggttctttttttgatagagtacgggacgtaagcgcaggggacggcgtgcacacatactcccccgttcgctacgctacgctgccaagtgtctgtacggattatgcccggagggtttcgcaggctgacgaaaccggcttttatgcgccgtccgtggcgcataacgccttgccccgccgtccatggcggtgcatttctgtggttctaagcataatcctacagactctaagcagcttcgctatgcgctctcgcaagagtatgtgtgcacgccgtcccctgcgcttacgtcccttacgctgtggcaaaatgtactatcccagaatccctaaatgtggcaaggcgggatttacaagtttggcaattacatatataataaggggaagaatatacacatggagaactattatgataaagaataaatttatggcacttacgcttacagtggcactcacggcgggcatgctttccggctgtggctcaagcgacaaggcaaaggatagggatgcgtacagacagtatggcatcaactgtatagaaaacggcagctatgatgatgcggtcgatgcttttcagaaggcactggaccagtcggtgggctcagtaggagccgaggagcttgacatatgctattataaggcaaaggcacagtatttaagcggtgacgtggatggcgcgattgatacatatacggctattatcgactataataaggattctgacgcatactatctgaggggctgtatatattttgccaagaatgattcagacaagggtatgaaggattttaagacggcgctcagtgagaataatgataattatgagctctatcttggtgtttatgagaccttgtcaaagtatggcatgaatgaccagggaaaggaatacctggataaggcattaaagcttaaggcaaaaactgctgatgactatatgcagagaggccgtatatacactatgcttggcgattatgattcagcaataaagagtctgcaaaaggctatcgatgagaagctggtcaaggcaaactactatatgggtgaggcatatcagaagaagggcgacaatgacagctcacagaagtattttaagaaatacctggacagcggtgaggcagattcttatgagctgatgaatatggggcaggcgcagatggacaatggtaactatgacactgcgattacttattttcagaacgcacttgaacttgaaagtgtgccgaacaagcagcagataacaaaggctatgattatagcatatgagtattccggtgattttgccactgcaaagagcaaaatggaggaatacatgaaggattatcccgatgacgaggatgcagcaagagaatatcagtttttggagaccagatagattatggcagatactattaagatagaggatattgaggagagagtggtgcttgtcggagtgagcgagcaggacggtgatgatgcggatgattcgctttcagagcttgcggagctggtaaagacagcaggtgcgacagttgtaggcacacttatccaaagaagagaaaaaattcatccgggcacgtatgtcggcaccggcaaggtggcagagattgcagagcttgtggagagtacaggggcaacaggtattgtgtgcgatgatgagctgagtccggcacagcagaagaatctggagacgtaccttgacacaaaggtcatggacaggacacttgttattcttgatatttttgcatcaagggccacaacaagtgagggtaagatacaggttgagcttgcccagctcaagtacagattaagccgtttgtcgggactgggaaagtctatgtcaaggcttggcggtggaataggaacaagaggtcccggagagaaaaagcttgaggtggaccgccgtcttataaatgacaggatagcacagcttcgaagagagctgaaagaggtgcagaagcacagagatatcacaagggcaaagcgtgaaaaaaataaagtaccggttgttgcgatagtaggatatactaacgcaggtaagtccacgctgttaaatcacctgacagaggcagatgtgcttgaggaggataagctctttgcaacgcttgatcctacaacgcgtattcttgcgcttgatggcaagcagcaggtgcttttaactgatacggtcgggtttatcagaaagctgccgcatcatctgatagaggccttcaagagcaccctcgaggaagcaaagtacgcagatatcattttccatgtggtggacgcatcaaatatgcagtgtgaaaagcagatgttcataacctaccagacattggatgatcttggtgtaaaagacaagaaatttgtcacactttttaataagcaggatgcccgcacagataacgaaccgctgcatgatttcagggcagattatactcttaacatttcagcggcaaaggatctgggattagatgaggtaaaatctcttttagaggagatattaagagagaacaaggtatatattgagagaattatcccatatgataaggctggcgtgatacagctcatcagaaaacagggcgagcttgtgtcggaggaatatgtggctgatgggatacagataaaggcatatgtgccgatggaggtgtacggcaggctcgattagagcgctgcttcgctatatcattatattaagcgaggaatttaaaatgtcgaaaacgcgttcaatccgctgggacaagctggacaacacagcaaatctgttccctagtatagcgggggagagcatgacaaatgtatataggatctcagtcaccttaactgatgagattgacagtgaaaagctgcaggaggcactggatatagtgcttccaaagtttggtctgtttaacgtgagactcaggatgggagtattctggaactattttgaggaaaatggcaaaaaggcaccaaaggtgcatgaggaaaatacatttccgtgcagatttataagaccgaacaagaatcacagctatcttttcagggtgacatattataagaacagaataaatcttgaggtatttcatgtgctgacagatggcatgggcggcatcaattttcttagggagctcacctaccagtatcttcgtctcacgcatccggagattgcaaagctaaagggcgattcattgacgcagggcacatccctaaatagagaggacagctttgtaaagaactacaaatcaagtaagccaagtggctttaacagacaaaaagcttatcttctaaagctggaaaaggtacctgatggagagtttgggctgatacatggcatgatgcctgtatcacagctgaagcaggtctgccaccgctatggagtttccataaatgattatctggtggcatgctttgtgtggagtgtgtatcaggagtgttttcacggcatgccaaacaatatgcctgtcagggtcgcagttcctgtgaatcttcgtccttattttgactcagtgaccacaaagaacttttttgtcatgatatctgctgagttcagaccgcaaaacagcacctacacatttgaggaggtgcttaaaatagtgacggattccatcaattcacagatttctaaggagcacctggaggatcttttctcatacagtgtgtcaaatcagaaaaatatcctgatgagaccggtgcctctttttataaaaaatctggcaatgaaggcggtctatacgcagtcggcactggcaaacaccaccactatcaccaatattggaaatataaaggtggagccggaatacgagccgtatataacaggcttttattcctttataccaatgtccaagggacagcctatgaagggcactatatgctcctacaaggacacgctggtgtttactttctcatctattctggccgatacgatgattcagagaagcttttttaagaagcttgtaaatgacggagtggaagtgacaattgagacaaatggagagtattatgactaaatgcatgaaatgcggtgtgtatattgcagacaatacagataaatgcccgctctgccagcaggttgtggcaccggttgaacagccatcggacaatggtacgagatatcctgacgtcaagggcgcatcaagaaaatacagattactggaaaatatcatattgtttctgtctatagtaggacagattgtgctgacaactgttgattacatgacagaccgggaaataaactggagctttatagtgcttcttgttgtaatctatgcgaatgtgacgttgcgtctggcaatagtcggaagaaacggatatatttttaaaattgtaagcacatttgtgttcacggtgctgtttctcgagggcatagacctgctcacaggagccagtggctgggcacttacatttgttttcccaagtgccatactggcgatggttcttgcaacaattatactcatgatagtaaacataagaaactggcagagctacatgatgatgcagctttttcttgtgctgatgagcgtgattgcgatgatacttgtggcagtcaaggtcatatggttcccatatctggcaatgggagcgatgggcgcatcgctgtttttgttcctcggaacattgattatcggtgacaaaagagccagaacagagctgaaacggagatttcatatatgataggctttcatggaataggaaattcgcatatgtttgaggatgaagagatgggaagcttccatccggaaattgaaaacggcgatagtaatggtgataatgaaactggaataataggagctttgggtaataagcttgaaaagacatttaagaactcattatctgcaatgaaaagtgagcatacggaaaaagtccatagcaatgcagctgtggcagatgaagaagtcagtatacagggaaaaatacttgctaatctgatgggacatatcacaaatgaccttgcaatcggcaaaaaaataaaatccggagagctcaggaagcgcatgaaggaacctgcatggcttgttccggactgctttgtaacagaggatatagatatgggcggcttcactatgaagcttttatcttcaaaggaaaacccaaatacagagcgtgtgatactgcagctgcatggtggtggatatatgggtgcagtgcgcaatgcatactatgtatttgccggactttataacgaagtaagcgagggctgctcagtgctcactcctgactatcgtgtggcaccggagcacccgtatccggcggcacttgaggatgccgtagcatgctataaatggcttttgtcacagggctggtttggctcgcagattgtgctggcaggagactcagcgggcggaggccttgcaatgtgcctcaccatgtatcttcgcgaccacgacatgccgctccctgcaggaatagtagccatgtcaccatggacagacctcacagcaggaggagagtcatatgagacaaactacgaaaaggaccctctgtttgggaacacaagggacagtctcatatacgtgaatgactatcccggtgaccacgataaaatggatccgtacatatcgccactgtttggtgatttcagaggctttcctccaatgctcatacaggcgggctcgatagagatgctcttatctgactcggtcgatgccgctgcaaaggcaagaaaccagggcgttaaggtgcgactgtcagtgtatgagggcatgtttcatgtgttccagatgggatatctcaatttcccggagtccaagcgtgcatgggcggaggtcaagcgtttcctaaaggtgattaaagaggaagaataaatgtaaagtattacaggaaattattgtggagacagatgatccggatgaaggaattatgatgtaggagtaaataattatggcaaagaaaattttagtagtagtggacgcacagaatgattttattacaggagttcttggaaacaaagagtgtgacgtggcaacaaatgttattgcagatgaaatcaggtcaggcaaatatgatgatgtgatattcacaagggatacgcatgatgaaaattatctgaatactcaggaaggaaagaaacttccggtaacgcactgtattaaaggcacaaacggatgggaagtagacgctcgtcttaaagatgcaatgaaggagcgtggagttgactgtgactatattacttatattgacaagccgacttttggcagcaaagagcttggtgaactgcttgcagaatatgacaacagcgatacagagatttatttctgcggattctgcacaggaatatgcgtaataagtaacgtggcgattgcaaagacattttgtaaagacgcagaggtgtttgtaatagaaaatgcctgcgcctgcgtaacgcctgaaagtcataagacagcaatagaagcaatgaagatgattcaggcaaatattatatagaaagtcatttattaaaaatgtttctgacatactaatagcgtaagaaatgggaggagaatattatgaaattaaaccagataatcacaagtcttttagagactgatatgtataattcagcatgggtcagacaatattccatcagtttacggattagatgttcctgcactcaatatcgtcatgaaaaccacaatatgcaatggtatggatgcagcgaagatttctgatacacccggcaaggggatgtgcaaaaatccggattatgtggattacttaaaccgctgcattgattacagaatgaaaaatgaccgctaaaaaggtatcagaagatgatgtgataaaagtagtttaaaatgtagaaagccgggatatgatatcaaaacttgcagagattgcttttgcaaatgtaagtaagggtgaaatagaaaagactctggaaacattctttacgcgtttcagacagcagcagtttaagcgttcatgcatacctgacggaccaaaggtgggaactgtttcattatctcctagaggtgatctgagaatgccaagcgatatggtggaattgcattaggcattgggaaggcagctaaatcaggagttgtaaatgaatggtgcaaaaaagtatcaactaccagttgaatagcataaatcaactagcagttcgttttagacagctactttttgatatatgatgactgcaaggaggtaagaaaaattgaacattacaaatagagcagtttcgaaatgggaaactggtgtttgagttataataggaccaagttagatgaaacctagtaaaatcaaggggttatgcctaatttagtccttatttttataccattttagcggtaaagatagggcaacgctgcaatattaaaccgaaaatccaagtcagtatcacagatgtccgcaatcggtctgagagtgaatctgtgtgcttagattaggtacaattttatatcaaaacatttagtgaggactaaattagcatttaagatggaatattccatcagctggtttggtcctctttttatttgagaggagtggtcgaatgggcaaggtgttaatttggttcgtaatcattattagtacagtggttctctactgtcttatgaaagttaaggcagagagtgatgaactgtatgaggaattaatgaaaaagcatttttatggcaggtctgatgatattcctgcatctgacaaaaccgagcacttgaaagggtgtgggtaattatatgaaattttgcaaaacaataatgcagacaatacagaaaaggagtaaaaaggaacatgaataacaagttagaagtaatcggcattgatcatggttggtcaatgatgaaaacaatctctcaggtatttgtcacaggagttaaggagattacaacaactccggcacttttcggcgatgtacttgagtatgaaggaaagttctataaggttggaactgtgaggcaggaagtaaaggatacaaaggtcgaagatgacagcttttatcttctcactcttgcagcagttgctaaggaacttaaaagaagaggtcttgcagaggcaaaggtattccttgccgtaggactaccacttacaaggtttggagcagagaagaatgattttatcaagtacctgacaaagaataagcgtgtaagcttcaaatatgagaatgagccgtattatattgaaatggatgatgtggcagtattccctcagtgttatgcagcagtagtggacaagattcctacaatggcaaagaaaacgctgatagtagatatatgtgatacgctttgccatcagcctgtttgatctggcagtgtttatttattattttcattccaataagaaaatgaaaccagtatcaaaggtatggatatgggctggatttaccatcgctgcaattatatggacatttgtcagcaacataaaaaatccgtatctgaatcttgcgactcttttgattgtgcttatactgttatcattttattatgaatcaggaatgtggacgagaattataaatattgtgacattcatgggtattggaatgctgtttgaacctgtagctttgctgttactccatgcgatgaattttcatatgggagaaagttataaatattattttgtaatggtaataggcagctttgttcgtggaaatgtgatgtatattctgtcaaaattgatttcaaagaaagggatgcagattgctgcctttccgaaagaaattttgggtgtgctggttatggtatttacctttacggtgttgaactgttgctttgttattcttttgtcattggaagctggcagtgaaaaaagcctgcttatgtgtgccagtattgtaatttcacttgtcctgacggattattttatgctgtatatgatggagcgttttaattatcttgtgcaaaaacagtatgaggatgcaatgtacagggaagaaatgcactataaagacatctattatgaagaagcagaaaaacagaataaggaagtgcagaagttaaagcacgatatgaaacataaattgcatgaactgtatcatctggtggaaaatagtgatgggcaggaactttcagagaaaagtttagataatctattt

SEQ ID NO: 1514 - DNA, 2216 bp, Unknown
  gut microbiota DNA sequence
gcgaagatttgcaatggtctcagttgcagtaatcgtagtagcactgcttgtagttggcatatatcttatactcgcatcgtgctgtattatgtatatgttttcgaagattatgaaggaaaaatatgagaaagaaaagctgctgtatatatcgaatactgatgcacttacagggtgcctgaacagacatgcctatgagacagatatcaataagcttgatttgaaaaaagagtggatatatatatcacttgatttaaacagcttaaagcacatgaacgatacatatggacatgatgtgggagatgagatgatttgcgcagccgcagcctgcatgatggcaagctttggtgagtttggcaaggtatacagaataggcggagatgagtttgttgtgatagtcacccaaaagccggatgagcttgatgctatgacaaagcatttcgacagcagtgtagccgaatggagaggaaaaatcgtcaattccatgaccatctcatacggatgtgtaagaagtctggaggaagactgggagcttgtacacgatattgagaaggaagcagacaggagaatgtatgcaagcaaggcacgctattatagtgacagtggcatagacaggagaaagtaaattaaaaataaagattccatcattccggatatggtattgatggaatctttcaagtgggaaaataaataattagtggaacagctctacaataaataccgccacacaggaagccacggccacggttgtaagccccttgccctttaatgcaaatatcactgccgcgataagtcctgctgctgcaccaacccaccagttagtagcataaaacactgccggaatagtcatggcggttaaaactgcatacggaatatagtatagaaaagatcgcacgaagctgttgttgatcttttcttttattgcgataaaaggaataacgcggatcagatatgtggagcctgcgagtatgagtaaatatataaaaaatacactgtttttcattatgtaaaatctccttatacgcttattatcaaatatttaataaatcattccttatcagtatcatctgcaaccggaaacagcagcgaaccgataactgcagccacaatggctacaacagtgatggtgataccgcttgaaatccttgacaaaaacggtacgtagtaaaacatgcagctaagcacgagtgcaagcagcacaacaaacacgaccgcccgcgatttcttcatctcaggaatcacgatagccacgaacatgccataaatagcaagactcagcgcactcataagcctatccggcagaatgcttcccagtatagcacctatcagcgtaccgacagcccagccgatgtatggaagagttgaaagtcctgcaaaaaagctcctgctcacagaatcctcctggcttgccacggcaaaaatctcatcagtcatcataaagccgagtatccatcttgaaattccgctaaatctggaatcagccttctgtccaaccgaaatcgacataaaggaatatcttatattaatagtaatctgcgaaataagcatctggaaatactgtcccggatgcatcataattccaatgcctgcaaactgtccggcagatgtgacagtggtgatcgaaatgagcacagcctgccaccaggatagtccatatgacaccgccataattccaaaagtaaatgaaactgacagatatcccagcgcaatcgggattcctgctgtcagtcctcgtttatagttttccattctaaattctccttagcataatacaacaacatgttattctagcacaaatttcatgaaaatgcactttcaaattgtttgtaccactttgcaatcttgcagctgcgaaccctgtaactgcataaagacaagaatgttttctgcgtaaagtaacttattgctatattacatctgtatgaataaagaaaatatattgacaaaaatgtgcaaattcaataaaattattaaccataagggcacacttatggaaacgtaaggtcgcaaagccagagtctaaaacagttacatgtagtaatgacagttcggctgcaacaaccggtgaataccggttgctgcagcctttttgtatgtatgaaaagtttattgaagtatgaggtgaaaagatatgaatggtgacaggcttatgtattttcagcatacagatatcagcagggttgtgtttgaagggtatgtagatgatgatgagataatga

SEQ ID NO: 1515 - DNA, 1533 bp, Unknown
  gut microbiota DNA sequence
atgaatggtgacaggcttatgtattttcagcatacagatatcagcagggttgtgtttgaagggtatgtagatgatgatgagataatgatgtgtgacaacatctttaatgccatggagaaaacagaaatagagcgcgcagatgtaagaaaactcaaaagaagcatggtgaactgatatggcaaaaaagaatgacagaaaagaatacaataaactgaagaaaaagaaagctgacaataaaaaacagcaggaacagtgccagtcagagatagatgtgcttgatgagaaaatagagaggctgaaggcggcatacaggaagctggatgatgccaaggaggctattgatgatatcaagcataaccagaggaatatgataaattcagacctttatcagtgcaagtggacaggcagcaatgcacaggaatgttatgattcatgtgagagcggaaatttatatacagcatatgacggatatgtgtcaaatatagatgcagcggaggatgccatcaactgggaaataaatacactaaaagaaaaaatgaatgaaaaatatggtgtgctttcaggacttgttaacgcatgggatgatctgtgcacgaaaatacagaattttttcaattaataaaagggagaggagaaatacgaagatggaaatcagccttgataatatgcaggtatcttttatgactgccggtataaaaacagcttctgattccgtaagtctcacagcggcagagacagaaatcaaaagcagatctgaagcaatggacaaatttcaggaagaatacaggcagctgaaagcctttgtgaaagattacagagatactttaaataatgatctggcaaaaatagacctgataataaatgcaataaatgaaaatgacagaaaacaggaagattatattaaaaatggtattggactatcagatacagctgtgataccctaaaactaggagatgaagatggaagggtttcagataaattatacggttgttctgggaatataagcgaaaaattgaaaatctaattgaaaatattgataactgcatagaaagaatcaatatgtttacggaaaatgcagtatttacaggaaaaaccggagacgcagtaaagagttatcttggtgaagcacatataacaatcctgtcaggcattaaagtaactgcacagacactgcttgacaatatggcagcatacaaggatggataccgtgccattgatagctcgacgaacttcaaactggatgaagaagcaatacaggaattcaggaaaaaactggcatcaaactatgaggatactgatgagtatacgggcgaaataagaagtgcactttcagaagtatcggacatatctgatgtgggcatgccggacagtaacggagtatttgatatccatgagcagatggacagcgaccttataaagcttgtctcaaatgtaaacagctacgagagggaaaatgtggtacggcttgaaaattcagtagagctgcttctggaaaatctgcagtcatgtctttcaaaaataggccttagccag

SEQ ID NO: 1516 - DNA, 195 bp, Unknown
  gut microbiota DNA sequence
gcccttttccagcttcctcggttactccatcaatcccttttggggctttcgccagcttgttcgcctctgcttcaattccattcagcccctttgcagttactctacttacaaccataccggcaaccattcctgctgtatcatttcctgtcacatctgtggttatcttctgcgcaccggctccggctcccattgaga

SEQ ID NO: 1517 - DNA, 9807 bp, Unknown
  gut microbiota DNA sequence
cagggagcacagacgcagtaaatgccctcatatcatattattattaggaacaggaaaacacatgaaaaacggtaaaatatcagagtcggttttaaagcgctctgtcttaaaacaacttcatactacaagcgacagaatactttttaaaccggcagtaggtgaggactgtgcggtgatttccatgcaggcaggcggccaaactaagttagttactgctacccagacgttcacacttgatgtatcggataagcatgtgcgtgccaactgcgcagtttatgatgcattgaacaatatttatgccatgggggcaggtcctattggtatagagctggcactgcttgtacctaccacagaaaacgaagccgtgcttcgcgagacggtgagagcgattgatgctgtatgtgaggacgcaggcattgtggtgcttggcggacatacacaggtgagccgtgcggtgaagaatatcgtggtgacagttacagcaataggtgaggcctatgagcaggtgctcacaccatcatctaaagcagcaccgggcatggacgtaatagtgacaggctatgtggggcttgagggcaccgcaattcttgcaaatgagaaaagagccgagcttgaaacgagattttccaaggcatttatagataaatcagcagcatatataggccatatttccaccgcaatggaggctgcatccgcgattggcgccggtgtggcggcaatccatgacgcttcgcagggaggcatctttggagcactctgggatatggcagaggcttcgggaattggtcttgacatcgatttaaagaagctccctatcaggcaggatacgattgaaataagtgaattttttgacataaacccgtataagcttttgtcaggaggaagtctgataatcatagctgcagatggtacccgcgtggtcagagagcttgagaaaacaggacaaaatgctgttatagtcggtgccacaactgattcaaacgacagagtgctgatttccggcgaggagagacggtttttggagactgcccagactgacgagatatacaaggttttcaactaacatatttgaatcaggagattatatatcatgagagaaaagatattaacatttatagagaaaaacagcaggataaacctgaaggagcttgcaatcatgcttggtgtggatgaggcaagtgtggcaaacgagattgctgctatggagcaggagaatgtcatctgcggatatcacacactgattgactgggacaaggcaggccttgagaaggtcacagccatgatagaggtcagagtgacaccacagcgcggcatgggctttgacaagattgccgagcgtatatacaactatcctgaggtgaagtctgtataccttatctcaggcggcttcgacctcatggtcacactcgagggcaagactctgcgcgaggtatcacagtttgtgacagataagctttctacactggatcaggtgctttcgacaaagacaaactttattctgaagaaatacaaggaccatggaactatcatggcggcacctgtcaaatccgatgaaaggggaattatgtcataatgagagaccctttatccagtaccataaagactatccagccatcgggcatccgtaagttttttgatatagtgagcgagatgaaggatgcgatttcgctcggagtaggtgagcctgattttgacacaccgtggcatatcagggatgagggcatatattcccttgaaaagggacgcaccttctacacctcaaatgcaggactcaaggagttaaagattgagattgcaaaatatctcgacagaagatacggcatgacatatgattacaacaaagagatcatggtaactgttggtggcagcgaggctatagatatcgcactgcgcgccatgctcgatgcgggagatgaagtgattatcccacagccaagctatgtttcatatgtgccatgtactgttttggcaggtggcacacctgtgattgtggaactcaaggaggaaaatgatttcaggctgacagccgaggagcttgaggctgttatcactccaaagacaaagatacttatcatgcctttccccaataaccctacaggcgctatcatggaaaaagcagaccttgaagcaatcgttcaggtggttaaggagcatgatctgtttgtgataagtgacgagatttattcggagcttacatatgtggataagcatgtgtctatagcatcgtttccgggaatgaaggagcgcacagtgctcataaacggtttttccaaggcttatgccatgacaggttggaggcttggatatgcatgtgcacctgagaccattttaaaacagatgctaaagattcatcagtttgcaatcatgtgtgcgccgaccacgagccagtatgcggctgtcgaggctatgaaaaacggcgatgaggatgttgcacagatgagggaggaatacaacggccgcagacgctatgtgcttcaccgctttaaggagatggggcttaagtgttttgagcctttcggggccttttatgcgttcccaagcatcaaggagtttggcatgacatccgatgagtttgccacaaagcttctaaacagcaagaagattgccgtggttccgggaactgcattcggagagtgcggtgagggctttttacgtatatcatatgcatattcgcttgatgatttaaaggaggcgctcggccgcattgaggagtttgtcacagagcttcgcgccgggatggataataaatagtttaaattgacaggagacaaaatggcaaagctgaacatagtgttacatgagccggaaattccggcaaatacaggaaatatcggaagaacctgcgtcgcgacaggcacgaggcttcatcttatagagccgcttggattctcactttcagagaaggcactaaagagagccggaatggattactggaaggatctcgacgtcaccacatatgtggactgggaggatttccttgagaaaaatccgggcgcaaagatatattatgcgacaacaaagggcagacatgtatactctgatgctcattttgagccagactgctatattatgtttggcaaggaaagcgcaggcattccggaggagatactaaaggagcatccggatgagtgcatcaggataccgatgataggtgagacaaggtcacttaatctgtcaaattcagtagctatcgtgctctacgaggcattgagacagaataattttgatcatatgaggcttgagggagagcttcatcacctgagctgggatgactaaatcaagcggcaaagcgcatatttttggcagctatttggacttgaacagctatgatattgtaaatacgatagatttttaggaaaaagaaatgggcataattaaaacaagcaaactagtacatgaatttatacgaagagacgaggagggcaatgtagagtcaatcactacagcactcgataacgtaaacctcgacataaaagagggacagtttattgcaatcctcggtcacaatggttcaggaaaatcaactcttgcaaagcatatcaatgcacttcttgcgccgagcgacggtaccatttgggtggatggcatggatgtgtcaaaggaagagaatgtcatacctgtcaggaaaagtgcaggtatggttttccagaatcccgacaatcagattatcgccaatgtcgtggaggaggatgtgggctttggacctgagaatatcggtgtgccgacagatgaaatctggcagcgtgtggactatgcgctaagggctgtcggtatgacaaagtaccgcacacattcaccgaacaagctctccggaggacagaagcagcgtgtggcaatcgcgggagttgtggcaatggagccaaaatgtatagtatttgacgagcctacagccatgcttgacccaaacggccgcaaggaggtcatagccacagcccatgagctcaataagaaaaagggcgtgaccatcattctcatcacccattacatggaggaggtggtcggcgcagaccatgtctatgtcatggaaaagggcagggtggtcatggacggcacaccgcgtgagattttttcaagggtggacgagctgaaggagcacaggcttgatgtgccgcaggtgacactggtagccgatgagctcaaaaaggcggggcttgatatccctgatggaatcctgacgcgagaagagcttgtaaatgcgcttgttgcgctgaaaaacagataggcgggagaaaatatgtcaataattctagatcacataaactattgctacagtgccgactcagcctacaaggtgcaggcacttaaggatgtaagccttgagataaatgatggagagtttatcggaataatcggtcacaccggttcgggaaaatccacacttatccagcatatgaacggccttttgaaggcgacaagcggccatatatactacaacggacaggatatatatgacgatgattatgatttaagcaagcttcgccacaaggttgggatggtgttccagtatccggagcatcagctttttgagacaaccaactttgaggatgtgtgctttggaccgaaaaatcaggggctcgataggaaaacagtggagctaagagcctatgaggcactgcagaatgtacattttccggaggatctctactatcagccgccgtttgatttgtccggaggacaaaaaaggcgtgtagccatagctggagtacttgcaatgcatcctgacgtactcatactcgatgagccgacagcgggactggatcctgcgggcagagatgagatactgggactgcttttacagatgaaaaaggatctgggtatcacaatcatactcgtatcacacagcatggaggatgttgcggagtatgtggaccgcatcattgttatgaattcaggagagatgatgtttgacggagtgccgaaggaggtattctcacactacaaggagcttgaggcagtcggacttgcagcaccgcaggtcacatatctgatgcatgatctggcagaaaagggtataccggttgacctttcggcaacgacagttgcggaggcgagggactcaatactaaaagcctttaaatagctcaccaatgctgacattttgatacaaattatgaggaaggaatacaaaaatgattcgtgatattaccataggccagtattatccggcgcagtcgccaatacataaactggacccaagagtaaagcttttcgcaacacttatatatattattgcactgttttcctacaagggaatagccggtgtgctgtttatagttgccgcgcttgccgcagttataaagatttcgaaggtgccctttaagttcatggtaaagggactcaaatccattataatactgctgctttttacagcatgcttcagcgtgtttttcacacagggagagtacacaatctgggagtacggtatactgcatatttctgacaccggactgataaatgcagcaaccatgatgatacgacttgtgctgctcattataggaacctcgctcatgacactcaccaccaccccaaaccagctcacggacggtcttgagaaatcactgggctttttaaacaaaatacatgttccggtgcatgcgatagccatgatgatgtcgatagcgcttcgttttattccaatccttattgaggagacggacaaaataatgaaagcacagatggcaagaggagctgattttgagcatggaaatatcataaaaagagcaaagagcatggtgcctcttttagtaccgcttttcgtatcggccttcaggcgtgcggatgacctcgcaatggccatggaagccagatgctacaatggtggagagggcaggacaaagatgaagccgctcgtatatgaaaaggacgataaaatagcatatcttttcatatttgcatttttagcggttgtgatagtgcttagaatccttctgccggtgaatctgggcaatcttattttcagatagtaaaatagatagtgcagccataacaggagagatatatgcgtgtaaaaatgattgtagcctatgatggcacaaattactgcggctggcagatacagccaaacggcatcacaattgagcaggtattaaacgagcacctgagccgcctgttaaaggaggatataaaggtgacaggagcaagccgcaccgatgcgggagtgcattcacttggaaatgtgtgtatgtttgataccaatacccgcatgccggcggaaaagatatcgtatgcactgaatcagaggctgccggaggatatagtggtggtcgattcctgtgaggtaagctatgattttcatccacgcttctcaaagagccgtaagacctatgaataccgcattttaaatgcgaggttcagaaatccgacacgcaggcttgacacatatttctatcattatccgcttgatacagccaagatgagtgaggctgcaaaatatctcataggagagcatgatttcgcaagcttctgctcagcaaactcgcaggcacagaccacagtccgcacgatatatgactgtacggtatcaaagaccggtgacatcatcacaatacgtgtgacaggaaacggctttttgtacaatatggtgcgcataatcgcaggaacccttgtgaagataggcgcaagcgatttgccggccgatgagatgaagagaataatagccgcaacagacagggcagcagcaggtcccacagctccggcacatgggcttacaatgataggactggagtacgagtaacagctttagatttttaatattatattaagatttttggaatatccgtttttagcttcaataataggttataatgtcgttacggttaagacatggtacggtaaaaagaagcttggagatgaagatggttatgagatttacagaagttaaagagaaaattataaaaaacaaagccataaacagcacagacaaagtaaaaggcagacaccgtagagtgatccgtataggagagtttgccctgatatttgtagtgctgttttcgtttgtctcgacattttttaagatgacggatgctgtcaatattgcgactatagagggcttttataaggagccgaaggactcaattgatgtgatgatgataggagccagcgaggtatacgctgattacagcgcaacagaggcctggaagaattatggatacacctcatactcactgggggtatccggagcgcccggcagcctgtacaaatcaatgctcagggaagctctcaccagacagcatccgaaggttgtggtgtttgaggtgaatggctttttacaaaaagacagctactacgacaggacggtaaagctgcacagctggatagacaatatccacaatgaggaaaacaggcttgatacaataaaagagattgtgccaaaggatgagcaggacaactttacaaatcctttaaaactgtatcacagcaactggaaggatatagacaaatgtgcacacacctttgccacaagagttggaatgtattttacaaaaacatcatgcatgaagggcttttcatctattgcaaaatattccgattgtccatcaggcaagcagaaaactctctattttaccgacaagagcagagcgtatatgactgatctgcttgagtattgtaaagcgcagggcgtaaaaaaggtgctttttgcaaggtttcctcatgagaaggaggtaaagaatccgcaggtgctttgcgacgtgaaggagcttgtggagtcctatggctatgattttgcaagctttgaaggtgataaggaatttataggaatcaatgagagggatgatttctacaattcagagcatctgaatataaatggaagccgcaaatttactgcatttatggggaagtatctgtcagataattacaggcttaatgcagaccactcaccggagcttaagagtgcatggggtgagtgcgcaaggcgcgctgacaaggtgataagtgcctgcgtaaaggatacggatctgagtctgggcaatcattattttgagatgtccgtttatctgccttataatttttcgtcaagtcttgcgacaaataaggtagcagatacgaacaacgacgcaaagcctgttaaggagttaaataccccggttaaaaaatagcatgatagtgtatggaatttaaaataaatactgccggtcaattaaagtgtgactggcagtattacattagaaaatatatttggagtaaataaaatggaactcatttcattaaaatatgtgatatttgtaatcgccctgcttgtactatattattgctttccgaagaaataccgctggtatgtgcttctggcgggaagcatggcatactatgtgattatatgtaagtggtatgtgctgtttatcatttttacaatatgcaccacctatggctcgacaatatggattgacaagctgttaaagaagcagaatgccgtcgtaaaaagccacaaggaggactgggacagacagacaagaaaggaatacaaggaaaagggcagaaaaaagagagtggcagtcatgctttttgcgctgctatgcaatttcggtatactggcattccttaaatatataccatatgcggggatgcttggacttttgcttccacttggcatatccttctacaccttccagtccatgggctatgtgatggatgtatacagggaaattgtcgagcctgaaaagaattttcttaaggtagcgctgtttgtatcgtttttccctcagataatacagggaccgatagcgatatatgataagcttgcgggacagctctacgagggacattcgctgaggctggaaaatctgcaaaagggtgcgcttctggtgctttggggagtcatgaaaaagcttgtgatagcagaccgcgcggtaaatatcatcaattttgtaatggataagccgatggatttttcaggcacctatgtattttttgcggcagtagtgtatgcgctgcagctgtatgcggatttttcgggaggaatcgatatagtgcgcggtatcgcggagatgtttggcataacaatgtcgacaaacttcaaccacccgtatttttcgcgctcactcactgagtactggcaccgctggcatatgactttgggagactggtgcagaaactatatcttctatccgctttcaatctcaaagcgtttcctgaactttggcaaatggctaaagccgagatttggtgcgcatatcagtaaggtgcttccgggctgcatcgcgagtgtcatcacatttatcgtcatcggagtatggcatggtgccaatatgaaatacctgtatttcggactctggaatggcattgtcatcatgcttgcggagctttttgctccggtaaacaaaaaggtggcaggcggcttttttaagctgaccagcctaagggaaaagggcatatttgcaacaattgtatcagtgctttggacctttatgctcatactggtaggctactattttgacatagctgcaaatgcgtcgacagcatttcacatgctttttaaatcagtcacagatttccatatcagcgagcttggaataaacaacatcattttgaatctaggagcatgcggactggacgagtacgatatacttttacttataatatgtacgctgctgtggttcttcatcagcttcgttgaggaaaataaaaagctcgacatgcgcgatttcatactttcaagaaagctgccgcttcgctgggcgataatatatcttggcatctttatagtaataatattcggttactacggaccgggagtgaatccggctgattttgtatatatgcagttttaaagaaaaagtttaaacataaagaaaaaacttaaagaaaaaaatt

SEQ ID NO: 1518 - DNA, 3016 bp, Unknown
  gut microbiota DNA sequence
tctttttctttcccctgatatacaataaatttccaaggctgcctgtttttagcagatggtgcaagggaagcactgtatatgatctcttcaattaactttctttcgatctcatctggcttatattttcttatacttcttctattctcaatttctcgtatcatagatttctctctcccttagagccttgccctcaaggctcattttctcctatgatttccaacctatccatcccaacatgacatttcagggaaagcacctcaacacctgcgtcctttgcctcctccagtgcaatgccaaattcgggatgcattgccgtattcggcctgacttcactgatttcctccatttgaatcacaaatgcaatcaagcatttatatccttgtccgcacgcagctgcaagttcccgtaaatgcttaactcctctttccgtcggggcatccggaaaatatccaactccgtctatctcaagggtgcagcctttgacttccattagatatttttgctttcctttttccatatagaaatccatccggctgtttccaaaggcatactccggtttaatacaatcatacccctgtttgatcagccattcttttaccactttattcggcgcctgggaatcaatgttaacccacatcccattctttttaaccgcaatcaaatcataacgtgtctttcgatttggattcttttctatgcaatcttctaaaatcacttccgcccctggcagcagtaattcacgacaacggcccgtattctttacatgaaccaattctacctcttccgctccgtcaatctttacccgcgcaataaaacgattgggacgttctatgaaaattgcttccactaccttatcatatttcatgtgctgtttcctattctcttatcattcgatagaatgttccggtaccaattcctgttgtcaattcataagcttgtccatcaatcctaaatcctgctttttgatagcactttaccgctctgatattccatgtacgaacttccagatacaacggcttgttaggatataacttttttgaaatttcataagtaatcaagagcattcgttgaccataatgtttattacacaaatcaggatttacgcctattccaataaatacctcttctttttcctccaatatattgacaaatcctaccaatatgctttcatcccaaaaaccataataatttttttccctttggggattcatgaatcctatctgtcgaacttgcatttcttcataagcaggaagattatacaaatcgtattctccgccatatttccatgcacatatttgtcgttttgcatcttcggatagatttctatatactaattcattcataacatttgcctcgtcgaacttaaagttatcagtctgtttcatcttttttataacttttattggatcttcattaggatgtgtggtatagaaaaacgctttggaatctcaactcacagcagcaatgttgaatcagtcctgctccagctttacctgctcacctgtgtctgcctcaaattcctctagctgcttaagccaatattccttatctttatttgttatcattcttatgactttacatggatttcctgccgctatcacactatccggaatatcctttgtgacaaccgaccctgagcctatgacaacatttgaacctatggtcacacccggattgatgaccgtattgccaccgatccatacattatcgcctattgtaaccggcttgccaagctccacaccggtatttctgatcatcgcatctatcggatgacatgcacagtatatattgacccttggtcccagaaatgcatgatctccaatgatgacatcacactgatccagaactatcagccctgtatttgcatagaaataatctcccacgtgtatattggttccatagtcacaataaaaaggtggctctatataacactcctttcccatgtgtgcaaataattttccaagatattctccggttcttgtcatagtctcagacctcgaagcactgttgaacttatctaccagatccttcgccttaccctccggatcccaatccacacatctgtataatttacttgctttcattcttccaagcattttctctactctatccatagcattttctcctcgcatttataatatttactcatcatgtttataactgactaaaggataccattgtttatgtctgtaatcaacttctagcaacagaaaagtggactgtgaaaataggcccatttttatctatcttttattaatacacataaaggtacattccaaaccaatgcagcgcagcccccagcatcacaaagatatgccagataaagtgcatccccttggtgtccttcacaaatggaatcatgccgagcgtatagacaataccaccgcccacgatccatcccaaaagcggcttgtcatttctgaaccagtctggaatgaacatgatggcgctccatcctatgacgaagtacagcgtatagtgtatcggtcggaacctgcctggtccgaacacacatattatggtgatccccgctatgatgagcgcccactgcacacagaacaacactattccaagcacattttcccagtacacaaggtacatcggagcaaatgttccgcctatcagcagatatatcgaggaatagtcaaatcttctccagatacgcttgactgctagcccggatttgtatgagtgatacaggcagctcataagaaacatcaatatcagtgatattccataaaaacacgatgccatcactttgagccctgtgtctgacttcaggagaagaaggacaaagccggctatggcaagtcctgctcctattccatgggtgactgcatttcccacttcctcaagcacggtgagttttggtggctcattcagttccctgtagtgctgtctttttgctctttttgcctctttcttctcttcttttctctttgtccagctcagctttctgctgagtgctcatatctgattccgagttctttatttctgccatatttaatcctgaaac

SEQ ID NO: 1519 - DNA, 2157 bp, Unknown
  gut microbiota DNA sequence
aaggtcaattaatcatggatgagcattaagcagacagctgatacttctccatccagtaattaatctggatgaaatatgcgataagctgcggacctgccatgagctggccaaaccacggactgccgtattctgccggtgcctttaaaaattcgcgcgttttgtcagcgtcaatgagagtgcgcacaggggcgttatgggagtctaatatctcctccataccctttataaggagagcttcatatccgggatgataagtctttggatatgggctcttttttctgtgcaaaagctcaggtggcaggacatctgaaaaagcatcgcgaagcagagtcttttccacaccgttttgatatttcatatgccatggcacattaaagacatactcaatgatgcgatggtcggcaaaaggcacgcgggcttcaagctcggagtacatgctggtgcgatccatgcggtcaagaagcgtctgcatgaaccatttgatattgagataaccgattatgcggcggctttcgtcctcgccggtttcgccgtaaaggagaggtgcttttgacctggattcttcatatcgaaaagcctgataaccggataaatcaagctccaaacccacatcatcgcgcaaaagagcaaggcgtggagcgacatccgatgaccatgggaagccatatctttcaagcagctctttgcggtaaaaccacggatatccgccaaagatttcatccgcacactcaccggtaagagctaccttgttttttcggctgacgaggctgcagaaatataaaagtgacgagtccacatcggtcatgccgggcatatcctttgcatcgactgcggcaaagagcgccttgaagagagagttctcatcacactcgagataggagtgggctgtctcatactcctcaagcatacgattgacatagggcagatctctctccggctggaagtcgtttgccttaaaatacctgtcattgtccttaaagtcgaaggaaaaagtgttgagcgttttaccgcgtgtgttcatatagtttgcggcgatggcggtcacgatgcttgaatcgatgccgcctgacagaaaagtacataccggcacatcggaaaccatctgcctttttatagcatcctccaccagaaaacgtgtgtgagcaacggtatcccgatagctctcagtgtgctcactgctcgtaagctcccagtaggtttcatcatgcagcccatcccgggagtaaatcatgaagtgccccggcaaaacctcaaacaaatccttaaacagggaaagcccgctcgtgtgcgcaggcccgatagcaagaagctcctgcaagccctgtttgtcgagctcaggctttactgcagggtgagcaaaacaggccttaggctcggagccaaacaccagagaatctcctcggatggcataaaaaagcggtttgacacccacgcggtcgcggtataaaagcagccggtttttagctgcatcccatatggcaaatgcaaaaatgccgtttaagtggctgacaaaatcagcgccccagtggatgtaggagtacagaataacctcggtatctgaggttgtggagcagacaaagccgttttcggacagctctggaatcagctcatccgtattgtaaatctcaccgttatagcagatagtgtactcatagccgttgtgagtgcgcgtcatgggctggtcgccgcacaggatatcacggatggcaagacggctgtgcgacaggccaatatgctttttaaggaaacgtcctctggcatcgttgccgcggtgggcgagcacagcacgcatcttctcaagacgaaagttccagtaatcggtgttctcttcaaagtcttctttaaaattacagaatccggcaataccacacataaaaatacatatctccgtaaaaacagatttaatttatattatgcatatgccttgaagctgttaatcgggtcagaaaataaaaagagattttaccagactaatcaaaaatttttattgacaagaaaggcaaaaaagcagtactcttattgcataaagttagataacgctaacgtggataaacaataggtaaccatggtaagtgaaatctgaccaataattgcttttaaaggtaaaaccttacataaggtagatgtaatatgaaatgttgaaagagaggatatcat

SEQ ID NO: 1520 - DNA, 19037 bp, Unknown
  gut microbiota DNA sequence
tatggataacatctgatgaaggaagaatcccttcttttgttatctgatttacagaaacttattaaccaagtagtcttgattgactacatcataattatactaggatatagaaaatgaaatttaattttaacaaaaaaatggttagcacaatagtgatattgatttttggcgtagcaattacagctgcagcattgtctgcaaagaatatagcgcttgaaaataaaacaagctcagaaatagccacagaggcagtatcagctacagagatgatattggatacagaaaatacagagactggtaatgtggataagaattcatccgattcctcaaaagacaaagcaacagtagtcgatgataaggacaaatctggtgatataaagaattctgataaaagttcaacaactacaaaagaaacgggcaaaagcttgaaagatacaaagagctcatcagaaaacaccgataataatgattccagggattcatatgagactgatataatgaaaaatgatgaatcagaaaacacttcagacgatgtaaataaaacaggtgataagattgataaaaaatctgaaataaacaattcaggaatgaataataataatgaaccgaaatctgataacggagtgatagagcttccaattataccgattgactaatgtgacgtcagttgtggttttacctacatttgaagaagaaacgtaagaggagttaatacaatggagaaagtcgaatgaagacaaaaaagtttttatcattggtgttaagtgcggctatgatattaggtgtggctgttccggtggcagcagaaccggtgtcagcaggacaaggcgttgaagcagaacaacagccaattgtagaaaatagcattacaagtggatatattctgagtgatttggattataatacaccggtgtatgaaccggatgaggcggtgccgtattctgatgattggggatattctgcagatgaaactatagagagcaagtatccggctaatggagtcagcgatatcaaagcgaaatatccgtctgttcgtaatcaaaatcctcttggcacatgctggacattttcgtcaataggccttgcagagtttgatctgattaatgatggtgcgtttgataaaaatatagatcttagtgaactgcatctggcatattatgcatataattcgctgttagatccgcttggtggaacagatggggactatgcaaagtactatatgaataatacaagtgttcagtatggttatctcaatcgtggtggcaactatttgatggcggcacgcagaatgggacagtggtgtggtccggtaagcgagagtgatgtaccatatagtaaggtggcaagcaacggatatacagcaagcactattgatacttttcttaatacaggtttatctgatgaatatgcatattcaaaggataaggcacatctggaaaatacatacatgattaatatcaaggaaaatgcatcagatgtgaaaaaagccataaaaaaatatggtgcagtgggaattatgtatagtcataatgataacggatatcattacataaataacagttataatgataaaacaaataacagagcaggtcatgcggtaatggttgttggatgggatgataactattctaaagataatttcagagatggtgttaaacctgaaaaagatggtgcatggcttattcgtaatagttggggagacggaaccggttcatattataatcagagttatttctggatgtcatatgaaacgttttctttatccgatacggcttgggtgtttgatttttctgctaatgatggatatgataacaattatcaggttgatggaggattaaatgtagcccatcaaagcggttacagaaaattggccaatgtttttactactcaggcaaaacagggagtatcttctgaggacttaaaagcagtttccctgtctattacatctaaaacaaatgttaattatacaatagagatttatacagatttaaaggataagacaaagccaaccagcggaacaaagcaggagactgctaccactacagggcagacaacctatgccggagtatataccattccacttaaagcagcggttaatctgaagcctgggacaagctattcggttgtagtgactactgatacacctgccgttgaccttgaggcagcgatgatcggagatgtaaattataataatgaaatggtgtgggagaatcatgcgtcaagtgataatacggcaagctattatttctatggtacaggattggcatattcccacagttggaattataagaatgtgtatggtaatttctgtattaaagcatttaccgccaataatgtagaaaaagattctgagaagcttgttggcagaagccttactttaaaagataatattgatatgaactactatatggagcttcctgaaagtatcaaatcaaacagcaacgcatatatggagtttacggtgaataatagccagccatataaggtcagcgtaaacgatgcaatccctgttgagaaaaacggaaaggttatatataagtttgcatgtccgctaaatgctgcacagatgtcagatacggttaaagccaaaatggtggtggatggtaatagtggaaatgagtacacttacagtgtaaaagaatatgccaccgagctcctgtcaaaatcaaacgagtatccggcggagaccattaagcttgtgaaggcactcttaaactatggaaccgcagcgcagaacttctttaaatataacactgataagccggcaaatgctggtttgagcgatacagataaagctgtagcaaatgctgattttgctgcatataaggctgttattaaaacagatagtgcaaatagtcagagtaatggactgacatattacggaagctctctgatatgtaagtctgagatgacagtaagacattattttatggtgaacgaaggctgtgatataaacaattacaagttcagctatgttaatgcatatggcaatgaagtcagtctgccccctaaaaaggcttcagatggggtgtattgtgtagatataaacggaataatggcacgcaacctgaattgtaattatgcatgcaaagtcatcgaaaagaataagggctgtattttagagctggactatggtccattcagctattcacagaaggtcattaatagcggaaattcatctgaggaattaaaaaatctggtgaatgcgctatattggtattggtattatggatataaaaattaaaaagactgcataattaaaaccaccgcagaatttaacgctttaactaagctaaattcctgcggtggtttcttttgtgcttatctgcttacaatgctaatcacggaagacaagaccgcctttctgacatatgggacaaagtaattcactgctctctgataaaaatatgctgtcattttctcttaataatgacagtatgatggtctgtggctggacactcaagattataaatgattgtatgttacagggtaatccgctatactagatataagtgtaacggattattttagttatgcagaaagagatgcagggtggtaggtgaaaaattatagattcgggtgaggtggatttttatgcaattttaccactttactgtactaaaatttaatattttttttacaaaatatgcaaaatatgacaaaaagtactggacaaaatgtcctatataaggtaaaatgcatatatgcaatcaagcagcacatttgagggttgtgcagatagtattaggtatattttacgaattggggggatttttcatgagaatatatcatgctaaggattatgcagatatgagcagaaaggctgcaaatatcgtatcggcacaggtgattatgaagcctaattgtgtattgggactggctacaggctctacacctatcggtttatataagcagctcgttgagtggttcaagaagggggatttggacttttcagaggtcatgacggtgaatcttgatgagtacaagggactaagccgtgagaatgaccagagctactattattttatgcatcagaatttgtttgatcatgtgaatattccggttgagaatactcacctgccaaacggcatggagccggattcacagaaggagtgtaagcgctatacagagctgattcagtctcttggcggtgttgatttacagcttcttggtatcgggcacaatggtcatatcggttttaatgagccgggcgagtcttttgacaagcaggtacactgtgtgaatctgacagagtctactattgaggctaataagcgcttctttgcatcggctgatgatgttccgaagcaggcttatacaatgggcatcaagaccatcatgcaggctaagaagattcttattgttgcaagtggtgaggataaggcagagatagtgcacaaggctttctttggaccgattacaccacaggtgccggcttctgtattgcagctgcacaatgatgttacgcttgtagcggatgaggctgcattgagtagcctgtaaatgttttttagttgagaaggtgcatgtatatgataataaaaaatgcaagggtatttacagaggatggcagctttatgcaaggtgatgttgtcgttaaggatggtcgttttgacagtgttttggagagaacagctgacacggacgcggctactgacagcgcacagcaggagattatagatgcatcaggtcttatcatgataccgggccttgtggatattcattttcatggatgcaagggagctgatatgtgtgatggcaccgcagaggcgcttgatgtgattacagcatacgaggcttctgtcggagtgacgagcgtgtgtccggctactatgaccattcaaagggatgagcttttgagtgtcatgaaaaatgccggtgattataattatcatggtggtgcacatcttgtaggtatcaatatggagggaccttttatcagtccttctaaaaagggcgcacaggcggcagagaatatcatgcgatgtgattatgattatttctgtgagcttcaggatgcggcccatggcttgataaagcttgtagatatcgctccggaggagccgggcgcgattgattttatagacaaggtaagaggaagtgttgtggtttcaatagcacacacagcggctgattatgacacagcggtagaggctattgagcatggtgcaagccatgccacacatttgtataatgcgatgccaccgcttcatcacaggaatccgggagttatcggggctgtgagagattcagaaaagtgtcatgcggagctcatttgtgacggagtgcatattcacccgtcggttatcagggctacatttgccatgtttggtgcgaagcgcatgattttaataagtgacagcatgagagccacagggcttgaggatggtgagtatacactcggtggacaggccgtgacagtcagaggtccgcttgccacactccatgatgggacaattgccggttcggcaaccaatctgatggattgtatgcgtttcacagtaaggcaggcaggtattccgcttgaggaggcaattatgtgtgctacagccaatccggctaaggagattggtatctatgatgaggcaggtagcatttctgcaggaaagagagcagattttgtgcttctcaatgatgatttggatattgtgagtgtgtatatcgacggaaaggagatatcatgttaggtttttttaagaataagtcaaagggaaaggtgatctgttctccgtgcaacggcagagtggttcctattacagaggttccggatcctactttttctgagaagatattgggagacggcgtggccgtgattccttctgagggcaggttttacgctccggcggatggtgaggtgacagctgtatttgatacgcttcatgcttttaccatgacgaccactcagggagttgagctgcttttgcacattggtctggatacagtgatactaaagggtgctccttttacatcacatatttctgttggtgatcaggtgaagaagggtgaccttttgatggaggctgacctggagcagattaaggcagcagatcttaatgtcattactccggttttaattggcaacactgctgattatagtgagataaagatgctcaaagagggggatgtatccgccggtgatgagattttaagtctcgcgtagatttgaatataattatataataataacgaactttattggagtatctccagtttagtatacataatgtaaaggaggggaaatttatgaaatttcttcaaaaattgggtaaagctttaatgcttcccgtagcagtacttcctatctgtggtatcctcatgggtattggatattttttatgtcctgcaaccatgcagggtggtgacatcgagggagtgcgtaatttaataggtctgtttttagttaaagcagggggcgctttgattgacaacatggccattctttttgtaatcggcgttggtgtcggtatgtcggaaaagaacgacggtaccggcggtattgcagctttagcttcatggctgatgatgacaacactcctgtctacagactttgttacaacaatcatgccatctatcgctgacagcgctacaaagacacttgcattcgacaagattgcaaacccatttatcggtatattagccggtgttattggttctttgtgttacaacagatttaaggatacaaagcttcctgactggctgtcattcttcagtggcaagcgttgcgtagcaattattgcaggtgttgtttcaatccttgtatctgtagtattactgttcgtatggccattacttttcggtgctcttgtagctatcggtaaagcaatcgttggtcttgacgtagtcggcgcaggtatctatgcattcctgaaccgtctgttaatccctacaggattacaccacgcattaaacaacgtattctggttcgatactatcggacttggagacctctctcatttctggaatggcgagacatcaaaggatgtttcatggagcctcggaatgtacatgtcaggtttcttcccatgtatgatgtttggtattcctggtgctgcacttgccatggttaagtgtgcaaagactgctaagaaaaaggctgccatcggtatccttgcttctgcagctatctgtgcattcatctgtggtgttacagagcctttcgagtttgcatttatgttccttgctcctgttctctatgtgatttatgctttactttatggtattttcacaatgattacagtagctcttggatttagagcaggcttctcattctcagccggtgcgatggatttattattctcatcttcacttccggctgcagcaaagacatggctcatcattcctcttggaatcgcagcttttatcgtattctacattgtattctatttcgctatcaagaaatgggatcttaagacaccaggtagagaggacgatgatgttgaagaagagaagaaggcagtgctttctaacaatgactacacagcagtagccaagactattcttgagggctgcggtggcaaagacaatattgcaagcattgacaactgtatcacaagactcagacttgaggttaaggatatcactcaggttgatgataagaagattaaatctgcaggtgttgcaggcgttatgaagcctggcaagaattctgttcaggttattatcggaaccaaggttcagtttgttgcggatgagttttctaagctttgcgaatagatttgttctgcaatatatcagtgttgattcaccttaggtgattcacaaaatttaataatacatgattaaaagccacaccgggtgttatgcctgggtggcttttttagttggttcgggccgtaagctccgcccggttgtggtgcacacggactctcgttttcgctacgctgcgctgttaagatactgtacggattatgcctttgggtttttataggcttgacgaaaacgtcgaaacgcgccttccatggcgcggttctccttgacttgccttccttggcaagtcatttctgctcttcatgggcataatcctacagtatctaaacagcttcgctatgcgctctcacgagagtccgtgttcaccccgccgggcggggcttacggcccttacgctgtgaatggaatccgcttaggagagagttgcgagttgcacattgttgcaaccggcaacggttttacctacgccttgcctctacgaggctgcgatgggataaaataagaaaggattgaaaaacgaacaattgtttgctataataaatgaagcgaggaaataaaagtatattaggtttagtaatctaagtattcatttaatttattgtaattagggaaaatctaatatcaatcgtttgatagaaagagtgattttatatgaacatatggctaaagttaaggaaaacagcagcaatagcactttgtgaattacttgcaattgctacaatttttacaggctgtgcctccactgatttagctggcactgaaggtgccgggcaaaccgcaggagctgttgtagcgggtgaggattcatccggtgctttaggcagcaaggatacggcggatgcaggaaagccgcaggatgagctggtaaacaataattcctatgtttctctcgatgcgattccggcatatgatggcaaggcgtacgtggccgtcaacaataatgagcctttttttacggacagcgatatgactaccactgcttttgaaaattacagtgatttggattcgcttggcagatgcggcgtggcttatgcaaatatctgtaaggaaatcatgccgactgagaagcgtggcaagataggtatgataaagccatcaggctggcatacggtgaagtatgatgtgataaaggacaggtatttatataatcgctgtcatcttattggctatcagcttgccggggagaatgccaatccaaagaaccttattaccggtacgagatacctgaatgtggagggcatgctgccgtttgagaatctggtagcggattatgtaaacaatacaggaaatcatgtgctttacagagtgactccgatgttttcgggcagcaatcttgttgcaaatggtgttctcatagaggcaaagtcggttgaggacaatggtggcggcatactttttaatgtctattgctataatgtgcagcccggagtcggaataaactatgagaatggtgacagttggctggaaggcaccgccccacaggagcagagcgctcagacgggtgcagcgcagaatggaggttcgcagagcagcgatggaagctcggcaggagcttcggcgggagataccggctcttcaggcggtacaacaggaagtgcatcatcaggctcggacagttcagtagcagaaaatagcgctgcagattcctcaaacagtaagacgatggttcatatcaccgcaaccggcaagaaatatcatcgggcgggctgtcgaaccttgaaaaagagtgacacagaggttacgcttgatgaagcaaaatccatgggcttgtctccgtgcggaatttgcaatccgccacagtaggatgaattaccataaacccttgacgattgcaaaaccgaaaagtataatagaatagctaatgaattcaatattttaatatagatggaggaaaccaaatggcactgagcaaaaagccggtcaacggcatgaaggatatactacctgcagagatggaaatccgtgattatgtgacaagtgtgatcaaggatacatacagaagcttcggatttacaccgatagagacaccatgcatggagaatatagcgaatctcacaagcaagcagggcggagaaaatgagaagctgatcttcaaggtaatgaagagaggcgagaagctgaatctggagacagcaaaggaagaatcggatgtagtagactttggaatgcgctacgaccttacagtgccactttcaagatattattcaaacaatgccaacaacctgccatcgccgtttaaggcacttcagatgggcagtgtgtggagagcagacagacctcagagaggccgctacagacagtttacacagtgtgatatagatatactcggagagccaagcaatctggcagagatagagctgattacagcaaccactaccacaatcggcagactcggcttcgagaactttgagataagaatcaacgagagaagaatcctaaaggcaatggctgcttacagtggtttcgctgaggaggactacgacagcgtatttatcacactcgataagatggacaagataggagtggaaggcgttgcaagtgagcttgcacaggatggctacccacaggaaaatattgacaaatatcttgatttgttcaagcttttggagcagacaagggatgtcactgagggtgtaaatatactttcagaaaagcttggtgaatatttagacgaagaagtggttacaaatatgacagagatagctacggctgtcaatgccacaaagggagcaaagtttgagctcgtatttgaccctacacttgttcgtggaatgagctactacacaggaactatttttgagatatcaatgcctgagcttggcgcagcctgtggcggtggcggacgatatgacaagatgattggaaagttcaccggaaatgatgtaccggcctgtggtttttcaatcggttttgagagaattatcctgcttctcatggagagcggcttcaagattcctgagagtccaaagaaggtggcttatctggttgagaagaaatatccggcagacaagcttgttgatgtcatgaaccaggcaaaagacgcaagagcaaacggacagcaggtgcttgttgtgcgcatgaacaagaacaagaaattccagaaggagcagcttatgaaagagggctacgaggagtttgttgagttctttaacagataggaatctgataagcagcagattagttgtgtagcggcggtatcaaacagttattagaataaatatatagtagaaatataaggagtataaaatggcagaatcaatgcagggcttacatagaagccatagatgtacagaggtatcaaatgccaatatcggtgagaaggtcaccgtgatgggctgggtacagaagagaagaaatttaggaagtctcattttcgtagatttaagagacagaagcggaatacttcagatagtattcggcgaggaaaatgtaggtgcagagggctttgaaaaggcaggcaccttaagaagtgagttcgtcattgcagttgagggaactgtccagaagagaacagctgctgtcaatgagaacttaaagacaggtgatatcgaggttatcgctacatcaatcagagtgctttcagaggcacagacacctccattccatattgaggagaattcaaagaccagcgaggacatcagacttaaataccgttatcttgatcttcgccgccctgatatccagagaaatctcatgctcagaagcaatgtgcttcgtgtgatgcgtgactttatggcaaacgagggctttttggagatagagacaccaatcctttgcaagtctacaccggagggagcaagagattatctcgtgccaagccgtatacaccacggacatttttatgcgcttccacagtcaccacagctctttaagcagcttctgatggcttcaggctatgacagatatttccagattgcacgatgcttccgtgacgaggatctgcgtgcagacagacagcctgagtttacacaggcagatatggagctttcattcgtagatatcgatgatgtaatcgaggtaaatgagagactgttaaagcacctttttaaagaggtcataaatgtggatgttgagattccgtttaagcgtatgccttggcaggaggctatggacagatttggttctgacaagcctgatacacgctttggtatggagctttgcgatgtttcggaagtggtaaaggactgtggctttggagtattcacaggagctcttgaaaacggtggctctgtccgcggtatcaatgtagagggacaggcaaagatgcctcgtaagaagattgacaagcttgtagagcacgcaaagggctgtggagcaaagggacttgcttatctgtgcatcaatgaggatggcacatacaagtcatcatttgccaagtttatgacagaagctgagcttgatgcacttgttgcaaagatgaacggaaagccgggagatttactccttttcgcagctgacaaaaataaaatcgtatggaatgtacttggagcacttcgtctcatgctcggagctgagcttggcctgattgatgagaacaagtacaatttcctctgggtaactgagttcccactccttgagtggtctgatgaggaaaacagatttatggcaatgcatcatccattcactatgcctatggaggaggattgggacaagatagactcagatccgggcgcagttcgtgcaaaggcatatgatatcgtactcaatggtacagagctcggtggaggttcagtgcgtatccatcaggatgacatccaggagaagatgtttgaggtgcttggcttcacaaaggagcgtgcacatgagcagtttggattcctgcttgatgcattctcatatggtgtaccgccacacgcaggacttgcctttggtgttgaccgtatctgcatgcatatgctgcatacagacaatatcaaggaggttattgcattccctaaggtaaaggacgcttcggacctcatgtcagaggcacccggaactgtagatccaaagcagcttgaggagcttggaatagctgtagctgcagaggaagatgaggaataacactataatatgaatttgaaaaaaaatattttcaatgcgattaccataatactgctcgccgcacttattgcgggggcagtattgcttaataacaggataaaaaagctcgagacacagatgtcatacacctcagacaacacatcggtgatactttctgatgtgcagaccatgcaggatgatatcaagtccactcttgaggaggaggccagcctcataacggactgggatatttccttaaaaagtgcagattttaccgatatgacatacacagtctctgtctcggtggtgccaaaggagtacacagaggatacaaaaaccagtgtatttttcggtacaaacgagataccgctcgagctaaacggcatcaagtatatgggtgaggccacccttccactgtctgaggactatgcaggcaatgtgacatttctgtttgttgacggaaataagagaagcacagaggtgctcgatgagtttgaaggtgtgacatcagtgttcaaaaatgtagcatctggcatacttgccaataaaccaacctttgacaatggcagcataaagcttggcacagatgtagatgtagcggtcatgggaaatgattactttgactttaacagtgtgcagctcgtggttgcaagctcagatacagagctaaagacatacgatatccgacagctgttggcagaaaacggcacagatagtgcagactctgcagacacagactccatcacatccgccttaagccggaaggatgatgccaaaaaagatggctcaaagaatgacacggaaaatgatacctctgatgcctcaaaagaggacgacggtaagctccatagcctcgaaggcacagtcaaaatcgaagacttaatccctgtcacagccgcaagcaatatcaaaatatatgtcaaggcagtatcggcacagggctacaccttcacatatgacctgttcgatggtaccgtaaatcaggacatcacagactttgaaaccacagccgacatatccggcggcgactacacagtaacggatccggccggcagcaaatacgagccgtaaaatataatataagcgtcattatttaaaatcagtttttcttgtgttttcaaggcggctcagaatatttataaacaatatataactattaaataagctcatttcgcataagtgaaatgagcttcaaatttaagaagtaaaaagtgccggacaaaatttcacgccagtgaaataagtccggcactgccagaatgcaaggcagcaaagcgcctcgctcgtaaacctgaattagccggagagcatacagtgtgttcagaagaaaaatgtgaactgccgcggagttccataaagtaaaaaagaaagaaaatgtaaataaaaccgtaatctgcccggacaaataaccgcggctgacttcacatttttctgaggaatatactgcgtgctatgccggcagcctcacaacctaaaaagcgaggcgccacaaggcgcctcacccttcttttttgctgagcggcaacgtaaatataaactcagttcccacaccctcagtacttatcacatttatattctcaccatgcgcctgcacgatttctttaactatagacaggccaagtccagtaccgcgcttatcctttccgcgggataaatcactcttgtagaagcgctcccagatttttgaaaggctgtccttcggtataccgataccgtgatcctttacagatataaacaccttttcatttctgatactcgtctcaatcttgatactcgaatcattatttgaaaacttcacagcgttgtcaatcaggttgtaaagaatctgctggattttgaccatatcaccgcgcacgaaaagctcttttccggtgagcagcaggtcaaagcttaagcccttttcactgcatttaccctcgaaggtaaggattgtcgtgcggatcattgtattgatgtcaaaatcagcaatatccaggtgtatgccgtgatgaccgaactggttcagatcgataagactcttggtgagcttattaagcctctcggtctcaaaaagtatgatatttaaatacttatcctgcatctcaacagggatggttccgtccagcatagcctccacatatccctttatcgaggtaagaggggagcggaagtcgtgtgatacgttggaaacaaacttgcgctgatcctcctcaagcgtatcaagctccgttgccatgtagtttagtgtgttagccagatagccgatttcgtcattggaatgtacatcaatctgggcagtgaaatcaccctttgcatacttctttgcagtttttgtgattcgtgtgattggccggtaaatagagcggctcatcattacaagtagaataaatgccactgcaaaaatgagcgctacagtgtaaaaggagatattcataaaaccgtttacacctgccgtgatatggctcattgtcttgtgaatgactatgtagccgatattctggtacgagacatttaccggggaaaatacggacagcatcttatgcttgaaggagccgtaaaaatctccaatcatatagttgtcgctgccaaaatcggtgacatcaaagccatttatcactacaggcttagaactgtcattttgggtatcaatgcctattgacggatcatctgagttcatgagcagctcaccgtcagggctgaccacccatacctcggcatccatatagtcggctacgattttcatgtgattctggaaatcgctaagcgacatggatgagccaaagtattcggcggcgtaatcacctgcaatgatggatgcttccctgtagagattggaagcctcctgcttttcgatatagtctgtggtgagatgctgtgtaaaggtgcatataatgaaaaaagcgatgacaccgtaaatcagatagctgattaacagcttagtgtagatggtatgcttcattatttattttacctcaaacttgtatccgatgccccagacagttgcgatgcgccaggttggcttgtccttgattttctcgcggagacgctttacatgcacgtcgacagtgcgggtgtcgccgacatattcatagccccatatgttgtccagaagctgctcccttgtaaacacctgatttggagatgaggcaagaaaatataaaagctcaagctcctttggcggcatatcaatctgctgtccgttataagtgacagagtagttggacagatttacaataagccccgggtactccacacacttgatatctacggaagcataagcctccggctttgcaggctggaagcgtctgagcacggccttgactcttgccacaagctcctttgagtcaaagggcttgagtatatagtcgtcggcgccaagctccaggcctaaaaccttgtcaaacacctcgccctttgcggagagcatgataatcggcacatcggactttgcacgtatctcacggcatacctgatagccgtctatgcccggaagcatgaggtccaaaagaagcatgtttggcttgtagtgctcaaacgcgataagcgcctgctcaccgtcatttacgattttggtgtcatagcattccttggtcagatatagagatataagctctgctatattgttgtcgtcgtctactatcagtattttctgtttaacagccatttctaatctccttcttaaaaattatttatattccgtaaaagtacattgtcgttatttaaaggttgcgatggttactccggcatcgccctcaccaaactcaccgagatggtattccgcaatagtttttgtcctcttaaggagtccatgcacagcctttcgcagtgcaccggtgccttttccgtggacaatgcgcactgatgaaagatgagcgatatatgcgtcgtctaggtatttatccaagagagcaagtgcctcatccgtagtctttcctatcaggttgatttctgatgaaactgacagcgatttgctcatctttatcttgcttccgctgccgccgtacttcttggcaggagagacatcgtcgtttaagagcacgaggtcattaatattaaccagcgagcgcagtatacccatctgcacatacaaatcgcccttggcatttggcagggtgtggacagttcccttcagattgagggagagcacaagtacagaatcaccgatgcgcagcttctttggtgccttgtgatttgccttggcagtgtttttcttgatgtctgacagcttcttttccttgtcattcatcttgtcacgaagggcagagcgctccttttccatctggctcataggagcctgcccctgtccgtatttgttgaaattgcggatggttttgtcggcaagttcctttgcatcctgcagtatcttgtaggcttcctcatttgcctcgcgtaaaatcttgtctttgctcttgtctatgcgctcgtttttctcttcgagctgtttcttgagcttttcaatctcggccttgtagctgttgatttcaagctgttccttttcgatagtctgtcgctgtgactcgaggcttgcaatcagatcctcgaaatcgaggtcgttatcattaattctgctttttgcatcctcaatgatgttttcgtccagaccaagctttgatgagattgcaaaggcgttactctttcccggaataccgattaacaggcggtaggtagggcttaaagtctccacattgaactcacagcaggcattttccacaccgtctgtggaaagcgcatataccttcagctcactgtagtgtgtggtggccatggtgatggcgccataccggtgcagtctgtttaaaattgagatggcaagtgccgcaccctcagtcgggtcggttcccgagcagagctcatcgaacaggcaaaggcttctgtcgtcagctttttcaaggatttttacaatattggtcatgtgagacgagaaggtactgagactttgctcaatactctgctcatcgcctatatccgcaaagacgtcctcaaagatggcgagctttgacctgtcagccgcaggaatgtgaagacctgcctgacccatgagagtcaaaagtccgacagtctttagtgaaaccgttttaccgccggtatttggtccggtgatgatgagctgcttatattcctcgccgagccgtacatctatagggaccacctttttagcatccaaaagcggatgacggccctttctgatattgatatgcccctcggtgttgaactccggtgccacaccgttatatgatttagccaagtttgcctttgcaaaaatgaagtcaagctctgaaagaatctcatagtcctgctccaaagcggccgcattcatggcaaccttgtcgctgagcgctgcaaggattttttcaatctcctcctgctcctttatgaaaagctccttgagctcgttattcaaattgacgacagccataggctcgataaaaagggtagagccggtagatgactggtcgtgcatcatgccgggtacattgcccttagcctcagcctttacaggcagacaatatctgccgtcgcgcatggtcacaaccgcatcctgcagatatgtccttgttgtgctgttgttcatgagcttggtgagctgcgcatggattctgtcgttcatgccgcgtatgctctttcttatcttaaagagctcaggacttgcatcatcggcaatctcttcctcggataaaatgcacctcttaatctcatcgcagagcgcagaaaccggttcaatccctgcaaacagaccggagagtgaatcctgcttctcattgtccatgccgcttctgccataagccttaacacgctttgcaacctctaacagactgcagatgcgaagaagctcggtcgtattcagtgcaccaccgatatcaagcctctttagggaagcgtgcacattgtgtatgccaacgaaggacactccgctgtccttgtacaggcggcttagtgcatcggcagtggtggtctgcagatgtctgatttcgtataaatcggtgataggctcaagcgaaagacaccttttctttgtctcatcacatgctgcgtagttgcttagcatggcgaggattttgttatattccaatgttttgtaaacttttttattcatttctatatccttatatttcggtagttgaatattaaattcatatttactgtatagcttatcatattatagctgaaaatcttcaaaaaaaccataataaatatgtattaaatgataattacaagatgataacataaagtttaatacataacaaaccagtttgttaaatgagccaaaaagtaagggcttgcgacatgtacccgccgcaagcctgtactcaaagcccatactcaaagcc

SEQ ID NO: 1521 - DNA, 15948 bp, Unknown
  gut microbiota DNA sequence
ttcacatgagagtactgaatatcgaagatgatacatttaaacacaatgatatatgcaaagccctgtcaggatgtgggattaaagatgtagaatggtccaataatctcgcggatggctggaaacagattaaaaactcaatggatagtaataatccgtatgatctgataattactgatatgtattatcctggcgagccgggctgcagagaggaacaatcaggggatatcctgattgacagagtgattaagaacaaaatcacaatacctgtaattctctgctccagtgtgaatctcaaatacccggaaatatatggctgtgtttattatagcagggaaagaaactgggaggcagatatgcagaagcttgtaaatagtcttgtggcaggatgatactaataaatctcaagcttctgatcaaccagtgattcaccttcatatacaagcttaagtgtgaagaaattttcttcattttcaagcaggagctttaagaagatagcgtcgccttcccaggtaggaagagtgggcacgatagttttatccacccatttgaggtcaccttcgttgcatgttataagcttgccggaaaattcatcagcggtgaaaagacacatcaattcaggctcctgtttatcacttataaaagttatgagtgcgcggaaacggtatgatgtgagagtgagccctgtttcctctttgacttcgcggagcaagcattcttcgggtgattcaccattctcggcgtgaccgccaacaccaatccattttccttcatttatatcattttctttcttaatacgatgaagcatgagatattgtccatcgtgttctatgtagcatagagtagttattttcatgatgtacctccgtcagatgattataaaatgatatgcgggtcactaaggtatacatcgaattgcatgcaagtatgcatcgatggtaccttttgaccccttaatcataacataaaatgtgggggaaaggtatgaaaatatagaggttaaaacagaggggcacatatattttttgaaagcgaaataaagctctgtgcataagtggaaaggtatgaatttttgcggtatgcaattactaaatcattttgtagagtaggattccctacagagaatacttccacaggccagaatggagcagcatatcgcacatatccctccggggcaatggttacaccaaggttctgtgatgcaagctgtatgcaggtttgattatttcttgtacggtaaggaacaggtggttgtattccatactggtcaaacagtctttgggcggaacgaccggtattctgatccggaaaatgtaatataaagggagtgtcagcgaacaggcttaagtcaagccatgggtagcggcactctttttttgttactgctttttgggcaagaggatgtccgacaggcagtactaataatatttcttcatggcacagcagctcataatttagtttgggatgctcctgccagttgcttaaaatggcaaaatccagattggtatcggatatcagcttgtcctgtatcgaatggccatattcgaaaaaattaatgcagacacctgggtgtttttcgttaaaagcaggcagcagctgtggtataaggctggtgctgcgcattggcggaagcgcaatattcagctcgccattatagtaagagcgcatatctgaaagctcttttttccagtcctgatcgagtgccagtactcttcttgcataatccagataacgctggcccaaaaaagtaagatcatactggtatccatttcgtctaaagacttttcctccaagttctttttcaagcttgtgcagatatttagttaatgttggctgagaaacatagagtgcttctgcagcacgtgtgagattatgatgttcagctatcgctataaaatattcaaggtcagtatattccatgacagatcccccatatatgtaattacataaatctaaaactatgccataaaggtatagaattgatgaaaacaatgaattagacacatgatatgttttatattactattaaattgttgaaagggcaagagaaaggtgatgtatatggggaaatatttagagaaggtatttcgactgtcacaatatgatacgaacataaaaactgagatgattgcaggaattacaacatttgttacgatggcatatgttcttgcaacggttcccaatatgcttggaaacgcaggattaaacaaaagtgccgtaatgacagcggttatactgttgatagtcattaccacatgtgcaatggcattttacacaaacagaccgtttgcactggcaccggggcttggaagtacaggaatagtggtatccatgataacaaatgaaggcatttcgccggagaaagcggcgggagtgatattcctaagtggaatactttttatcgcaatctcttttttgggactgcgagaggctgtagtaaaagtgataccggtcagtcttaaacatgcagtaagtgcaggaatagggctgttcatagctctgctgggggcaaaaagctgtggacttatagctgccagtgagaaaaagaatagtcttacatttggtgatttaaggtcaccggaagttattctttgtctgataggattttgcctgatgctcttggtaaagataaagaatataccgggaggcattattttatctatactcattaccacgatagccggaattccgcttggtgtgacaagactgccggataggataatttcatttccgggaaaaatggatgatatatttatgaatattgatataaagggagcattgaatacagcatatattccatttttgatagcactgttcataccggatttcttctctacatttggcacggtgctgggcgtaggggcaaaagcaggatatctagatgaaaagggaaatctgccgggaattgagcaatgttttcaggtggatgcagtgtcaacgagtgtaggcgcattgtttggaataccgagcatgactacatacctggagtcatcagccggtgttgaggcaggcggaaaaacagggcttaccgttatatttacaggagtatgctttctgcttatgctatttttctcaccgattgtgctgatgataccgacagcggcaacagcaccggtgcttatatatattggaatacatatgcttggtgcgatgaaaaatattgattactctgatatgacagagtatatgccggcatttttatgtattggctttactatatttgcaaacaacatagcgaatgggatctgtatagcaatcccggtgtatgtacttatgaagctgatttcagaaaaagcgaaagagatacagcctgttatgtacatcgtgacagctatttgtattttatattttataacattgatataaaggcatatgaggtaccgcatataccaaatttatatcaaaagatcatacatgtagaaaaggagaatcacatgagtaaaagaccaattataattgataccgatccgggcatagatgatgctcttgcaattgcgatagcattattttcagaggagctggatgttaagctgattaccactgtagccggaaatgtttcgctggatcaggtgacagaaaatgcgcttaagcttttaaaattttatgaaaaggatgtaccggtagcgaaaggctgtgcacagccgcttctggcggagtttgtggatgcttcggatattcatggtaaaagtggaatggagggatatgatttcccggagccgaaaacagagcttttattacaggaacatgccgtaaacgcaatgcgaagagtgataatggaaagcgacgagcctataactatagtgccgatagctgccatgacaaatatagcattattattcactctttatcctgaggtaaaatcaaatatcagagaaatcgtcatgatgggcggttcagtcaccagaggaaataaaggtgttatgtcagagtttaacgtggcaacagatccggaggccgctgcaatggtatttaattcaggcgttcctattgtaatggctggacttgacgttggctggaaagcgcttgttatgccgcaggatagtgaagaaatcaaaaagatgggaaaagtcggagatatggcatatcatcttttcaaacactatagaggcggcagctttaatacagggcttaaaatgtatgatagctgtgcaatagcatatctgctttgtccggagctttatacagttgaggaaacctacgtaggagttgaactaaatggcactatgactacgggatgtaccgtggttgatctgaagggttatcttaaaaagaaaccgaacgctaaggtgtgtacggatattgacggtgagaaattcagagaatggttcaagcagtcaatttcaagatgtatataataatatttaaggaggatggattatgactacatttgtcatgtatgctgcagccattatatctgtggcaatagtaatttttatgcttatcaaaaagatggatattaagataacactctttttgatgggaattgtacttatgtttgttggatgtgcacttggaaatccgctaggaggcgaggattttgtatcgacaggatcggtgtttttagatcctttaaaggtaatcgcagatcagtttaagagtactatatcatcagcaggatttataatactgatacttggcggttactcagcatatatgagtgccataaatgcaaacagcgtaacagtaaacgtgcttacaaagccgatagcaaaaatcaaatcagtatatatattggtaccgatcgtatttttactcggaaacctgctttcacttgttataccaagtgcatcaaaccttgcagttatcctgctcgcaacactttatccaatccttataaaggctggaatgagttcacttacagcggcaggcatcattgctacaacagctactattgtacctacaccactcggaagtgataatgtagcgattgcagcggagcttgcgaatacaacagaatttgcaggactgacagcaacagattatgtattcaaatatcatgcaatagtatcaatacctacactgcttatcatggcagcaatccatttcttctggcagaaaagatgtgataaaaaagcaggcgtgatcgaggctaaggcagtagagagcaaagatgttgaggaaattaaaggtgggttattgtacaagacagtatatgctattttaccattacttcctattattttgcttatcggttcatttgctgtacagaagattacaggagcacagattgatataagcgtggaagtagcaacattattctcatttatcgtagcaatcatctgtgaaatcatcagaaaacgtaatgccggtgaaactcttaaagagacagaagcatttttcaagggaatgggtggctcaatgccgatagttgctctccttgttgcaggaacagtatttgtaacaggcttaaaatcaatcggacttatcacagcattacagagtgccatgacaggtctttcaggcggaggacttggatttgtacttccactcatactggttgcgcttacagcacttatcgtacttttaagcggaagtggtacagcattattcttcgcaatggttccgcttatggtgccacttgcggtagcagcaggaatttcaccgcttgcggtatcaatcccaatgggacttgccggaaaccttcttcgtgcggtctcaccggtatcggcagtagtaatgattgtggctggaagtgtaaaacgcgagccgcttgaaatagtaaaaagaacttctgtaccaatgattgcaggaacagtggtaatgtttgtactttctatggtaatattcctataggaaagtatatgattatatttgaaagaaatatattatttggagggctgcagacgtgaaagcattaaattatggatcgttaaatattgattttgtatacaatgtagagcattttgtgagaagtggagaaaccatatcctcacagaacatggcaatatttgcgggaggaaaaggacttaaccagtctgtagcccttgccaaaagtggcatagacacctggcacgcaggtaatatcggcgaggatggagagtttctggcagagatactgcaaaaagcgggagcacatacagacttcatcacccgtctgccgggcagaaatggccatgccatcatacaaaaacagccaaatggtcagaactgcatactgctgtatggtggttcaaacaggcagaacacaaagacacaggtggatgaggtattatcccattttgagaaaggagattatctgattctgcaaaatgagataaacgagatcgcatatatcatggagcgggcgcatgagaagggcatgataatagtgctcaatccgtcaccgatggatgaaaaaattttcacatatcggcttgagtatgtggattatttcctccttaatgagattgaagctaaggatttgacaggattaggcgattccgttggagaagtcaggtgtattgaaactgatgaactccttgatgcagtatgcagtcatttcccgaaaagtaaggttgtgttgactttaggagaatacggctcaatctataaagatgaaaaacaaaaaattcaccagccgatagtgaaggtaccggtggttgatactacagcagcaggagatacatttaccggatttttcatcggaagtatcgcaaaaggactttcaccgaaggaagcaatgcagatggcagcaaaggcatcggctatagctgtttcaagacagggagcagcaccatctatacctgaattgaatgaagtatatgattttggccgataaagggtatggtattatgggggagcacgaaagaccttgagtttataatgaactcaaggtctttttctgtattataagcaatgaatttataacaaatataaaaatctgtatgaagtttgactactaaatacagtagatatggtgtaaaatgattcttatagtaaagtcaggacattatcaaatgcaatggagctatggaaatataagggaatgtatataacaactatacgatataaatcttaaaagaagagggaatatcattatggcaaaaaaagttactataaaagatatagctgatatggcaggggtttcaatcgcaaccgtttctcatgttataaacagaacaagatatgtgagcccggacctcgttgaaaaaatagaaaatattatcatagaaaccggatatcataaaaaaatagaagaaaaagaaagacgacttaaggttggaagacagtcggaaatagttgcagttattccaagtgttgaaagcacgatttatcgtgatatggtggtatatttaaaaaaatatgtcagcattcaggggtatcagttttatatcgcaattacggacaatgatattaaagaagaggctcaggtactggaagggctgatacagaataaaaaaacagcaggtattatacatgtacctgtcagtgatgttgccgcagattataaaaagctgattgaatccggaattccatttgtctgtatggaaagaaatattttgggagatggtatagacgctgttgaatttcgagatagagaagccattttcaagggaactgattatctgttagaatgtggtcataagaatattttgtttttaagagaaagcttgaagagtacgacgagagatgaaagaacacgaggctttctccttgcattagaagaacatggaatcaatacaaatgatgcaaatatttcagacattaatatcgaatccggagctgataactgtattttggaaatacaaaaggcaatgagacgatatatgccaactgcaattatggcgggaggaaatagaattactttatatcttatgaaaactatgagggatagaggaatagaatgtcctgaagagatatcggttgttggatttggtgatgagggatggtcggagttaacgtatccaccattgacgattttaaagagagatgttgaagggctgagcagacgagcagtaaatatgctttttgaaaagataaatacaggacatgtgattgaacaggattattatgccgatgtagagttgataataagaaaatccacaagaatgttggataatggaccttttggagaagaagcagctacaccggaatcaatagtcataacaaaagaggaaaagagccgtttgcgtgccggaaatttccgtgtggcaatttcgtttcattatacaggaacatcatgggcggaattacacgaaaagggaatccgcgatgagttggaacaatacggaattgatattatatcagtaacagatgcacattttgatgcatctttgcaaaatgcacagcttgaaggcattcgtttacagaaaccggatgctgtaattgcaattccgactgatgataaagaaacaaaagaacaattccgtgaattggcaaaggtgtcaaagcttgtattcctgagtaatgtccctgagaatatggaaaaaaatagttatgtttgctgtgtgtctgttaatgagattgaaaatggaattaatgtcggcaggatgatggggcagtactgtaaaggaaaacacgttgaagccggatttatcatacatggagcggtcttttatggtacgcgtgccagggatgaggctgcggaaaaaattatttcagaacaatacaaaaatatagatattaaggcaataagaggttttggagaaattgaaaatgcatatcaggtttgtaaagatatgattactgagaatccacaaattaaagtcttgtatgtaagctgggatagaccggcgctgttggcaattaaggcgttgaaagagatgcatagagaagacatcgctatatttacaactgatttagattataaaattgcacaatatatggaaagtggtattgtaaagggattaagtactcaaagaccttatgagcagggaagaacagctgcgcatgtggtagcgaaatctttattaagtaatgatgtgccgaaatatgttggagtgcagccgtatgttgtggatgctaagcagctaggaagggcatggaaggatatttttcatgagggaatgccagaagaaattaaatgatgccaaataaaattaaatatctaaaaagaaatatatgcgaagaaaaagaatatcatttggatattctttttttaattactaaaaatttacgtaaaaaatactttttaaatgttaatttgcgcaaaacacaattgtataattgttgaaaacgacgaattaaacaaggctttacgtaaaaatattgacaaataatagagcaaaatatatcatgtaatcacagaaacaaacaaaaacaaataaatttacgtaaatttaaaaatggaggaaaaaactatggcaaaaataaaaaaattattagcgttgggtttatgcttatgcatggcagcaggtattacggtaggatgtggcgatagtaagtcatcaaagaatggtacagattctggaaagaaaacaaatgatggattatcgtttgcattttgtactaataccttaaacaatacatttcaaagctcaattgattcaaagctaaaagaactgtgtgacaaagatggaatatcatatacatgtttagatcctgactatgatttgaataagcagcttagccagttgtcagatgtagcaaataatggatatgatgcagtatttgttattcctgttgattcagcaggaataacatcgggactggcagaaataagcgaagctggtattcctatatttaatgtagacactgcagttattgatgatgaccttgagagctttgtaacacaatttgttggaactaatgcgtatatggcaggacagcttgttggagaacagatggttaaggatcatccggatggaggaaatattgcaattttggatttcccttcaaatgaaagctgtgttgatcgtgtaaatggatttcttgatggacttggagacagcaaagataagtttaagatagtagcacagcaggatggtggagcagccttagacaaatcaatggagctggcagaagacattattacagcatctcctgatatggatgcatttttctgtatcaatgatccatctgcacttggtgctgcagctgctattaaagcagcaaataaaacaggcaaaattggtgtatatagtattgatgcctcaccggatggaaaacaggcattactggatggtgaatttacagctgttgcatgtcaggtacctgtacagattgcagattattcttttaaggaagctgtaaagtatgttaatggagatactaaaattgatgagaaaaaggtatatctcgattcgcatttagtgtctaaggatgaggctgagaaaactcttaaagaatggcaataataagggagagttattatgggacagacagtattagaaatgacagggataaagaaaagctttgcgggtatttacgctttaaatggaattgacttttctttggaactgggcgaagtacatgcactgcttggtgagaatggagcaggaaagtcaacattaattaaagtgcttggcggaatttatcagccggattgtggattgataaaagttaatggaaaagaagtaaaaattgatggagtcccagcagcaagagcaaatggtataggtattatacaccaggaaatagtattggtgccttaccttacagttgcacaaaatctgtttttgggaagagaaattagaactagacttggaaccttggatgaagcggagatgaaccgcagggcagcagatatgatctctgccctgggggtcaatataaaagctgaaacagtagttgagaagttgactatcgcacaacaacaaatggtagagattgtaaaagctgtatcgtttaacggaaaaataattgttatggatgaacctacatcatctctttcaaatgaagaggtagagcagctatttggaattattgagaatttaaggaagaaaaaagtaagtattatttatatttctcatagaatggaagagttattccgaatatcagatcgaattactgttatcagagacggaacatatgtaggaaccaaaaaaactgtcgagacgaatgcgaatgaattggtagcaatgatggttggaagagatcttgataatttctatgtaagagattattgcgatgtggaacatgctccaattgcacttgaagtaaaaaatctatcacaccagggaacattcgaagatatcagcttttcggtgcataaaggcgagatacttggatttgcaggacttgtaggcgctggaagaagcgagattatggaagctgttttcggagcaagaccatatgatgccggccagattttcctgaatggagatgaagtgcattttaaaaatcctatgcaggcaattaaatcaggaattgcattggttcctgaggacagaaaaaaacaggggcttgtactgggaaacagcgttgcattcaatttaactttatcgagtctgcgtttttgtatgaatggaattgctatcagtgaaaaaaagcgtgattcgattattgaacattatagtaaaagacttaggattaaagcagcttctccggagattgaagcaggtagtctttcgggtggaaatcaacagaaggttgtacttggaaaatggcttgcaacaaagccggatgtcttgattttggatgagcctacaagaggcgtagatgtaaatgccaagtatgaaatatatactgtaataaatgaactggcaaaggcaggcattgcaattattatggtttcaagtgaattgcctgagattatcaacatgtgtgataacgtttgtgttataagagcaggtaagcttgttggaaagcttggaaaagaccagatgaatcaggaagaaattatgaagtatgctgcaggaggcgtagagtaatatgagtgagaagaaaagagaagtaaatgcatttggaaaaagaaatccattcacttcaattataaaaggcaatataggaattattgcagtattgattattatgtgcgtaatagtgtcaattgcaacggataaattccttacaaccaataatataatttctgttttaagacaaatttcaataaatacatatatcgcactgggaatgacactcgtaattatactgggacacattgatttgtcggttggttcaattgttgcgatgtcgggaacccttacggttggacttactgtaaatcagggaatgccacttatagtagcaataattattggattggcagtaggaactcttgctggatttatcagtggatttatagtatctcattttaaggtacctgcatttattattacaatggcaatgatgaatattgcaagtggtattgcatatgtgtatacaggtggacagtctacacgtattacagataagatgtttatagctataggtacaggatatttgtttaatgtaattccgcttccggtagtatatatggtaattttgattgcaatattcagtttccttttaagcaaaactaaatttggaacttatgtatatgcaattggaggaaacagggaagctgcaagattatccggcgttcctattaaaaaaatagaaattattgtatttacgctttcaggcgcgcttgcagcattcgcaggacttgttctttgctcaagaatgtattcaggacagccatcagtaggaagtggatatgaattggatgcaattgctgcatgtgtacttggtggaacatcaatgaccggaggaaagggccggataagtggaactgtatttggtgcaatggtaattggaattatttccaatggattaaatctgataggagtttcatcttattggcagctaattattaagggtctgattattgcatgtgcagttctgctggattgtcagaaggataaaatagcgttgttaaaaaataaggtaagggctgcaaaataaattggaaaggaaatctgttcgttttttacaatacagagaaagataagcaaatggaaatttttcgtaaaatgtctttcgcggattctacgggagatgcaattccgttttaccacgaaggaaaatatcatattttttcacttacatctccaccgggaacgaccgtctatccggagagactgcgtacaacctggagtcatagtatatcggatgacttagtgcattggcaggagcttccgacggcattatatccgggagaaggagatgaaccggatgcttcaggagtgtggaccggttcagtaatatatggtgagggacaatatcatgcattttatacaggatattgtctaacagcggagtttcagcagaccatatgtcacgcaacaagcgatgatggaataacgtggacaaaagatatcgcaaatccggttattactccgatgacagagctttatgaaaaacttgattggagagatccgtatgttttttataatgaagaagatgaaaattattggattttgatttcagcgagaagacttgatatgccggttacacgaaggggctgtatagtgctgtaccgttcaaagaacttaaaggattggacgtattatggaccaatatattcaccggggcatacaaactgtccggaatgtccggaaatgtacaagatgggaggtcactggtatttgtcttactcaagattttcagagtttgtaaatacaatataccgtgtatcagagtctccttttggtccgtggagaaaacctaaaaaggatggtattggtggaagacgcttttatgctgctaagtcaatgcaaaatgatgatggaagacgtttttattttggatgggcgcatgatcgtgcagagcagagtgacaaaggtgaatggtattggggtggaacattttgtattccacatgaagtggtgccaaccgaaaatggagagttaaatgtaaagttaccatgtgaatatgagcatatttttgataaagctgttaattggaaatatatatcagttcttggaaatgcaaaagattatggtgaaaaaactataacattgaatgcgttggaaagctgttcatatggatttttgagacatacggaagaaagctatatgctgacatgtaaaatagtaccaagagaaacatatgatacgtttggtattcttttaaagtctgataaagaggcaagtggatgtttatttcttgaatttgataaagcaatgcaaagggtctcatttttaaatcttccgatgggagtggatccattttgggtacagtcgtgtcaggcggttccgccggcaaccgagcctgggccggatggggtgcgtgtctgtgagaaaacaatgcaaattgaagacggaaaggcaatagacgtaaagattattgtggatcatgacatgatagaggcatttattgatgaacagatagcgttcacatatagaatatatgccaaaccggaatttgaaactggtataattgctcaggattcaaatgttgaattctataatttaagcatttccggaaaataattgcgaatgggagagacatggatggaaaaagaatatgatatagttgcgatgggagaattattaattgattttacaccggcaggagtttcagaaaccggcatgtgtctttatgaacgtaatccgggaggggcaccggtaaatatgcttactgcagcagctaaagcaggattgagaacagcctttataggcaaggttggaaacgacatgcatggtaaattcttaatagaagctgttgaaaatcaaaatattaacagcgatggcattatattggatgataatgtatttactacacttgcatttgtaaatcttacaaaagatggagaaagatcatttgcgtttgcaaggaaacccggagcagatacaatgatagggtacaaggaagtcgatactcaaattttacagaatacaaaagtttttcatgtgggttcactctctcttactgatgaacctgcacgttccacaacattccaggcagtaaaatgtgcaaaaaatgcaggtgcagttatatcatatgaccccaactacagggcacctctttggaataatgagaagactgctatagaacgtatgcgttcaatgcttccgtttgcagatatgattaaattgtccgatgaagaaactgctttacttacgccatatgaaaatccggatgaagcagcaaactatttattagaccatggaataaaaatagttgcagtgacactcggaaaagaaggggtgttaatatgtaataggaaggatcatcaaaaggtaagtggtttttcaagtcaagtagtagacactacaggggcaggagactcattttggggcggatttatgtctcaatttgtaaaaagcaaacttaaccctgaagattgttctattgaagaattaaaaaaatttgcaaggtatggaaatgcggtagcaagcctgtgcatagaaaaaaaaggaggaatattgtcaattcctgaagaaaaagaaacttttaaacgtttacagctaagtgtatgaaaaaacaatcgtagtgcaaaataattgaaaatatacgattataacctcactttcaattttaataaacatagtaatgaaaaatgcaacatttctctaagaaatgttgcattttttatcttacagttactatatcggacatcaattctaatactttacacccaattacaacttatttaaaaattatatttgccctttattggttgtatctgccttttttgatgaccacttcccacaaaaatccttgttcttagacgaaaaatgcaacatttcttagagaattgttacatttcacataagcatggaaacagcttaaatcaagtgcacggaggtatacagaatgcttaaattatcgcttaaagagggagaatatgtaaacatcggagacaacatcagagtggtctatgccggaggaagcggaaagaacggacgtctcatgatagatgctccaagagagatgaacatctcaaggtctaacaacgatccgaatcctgagaagagaaaggatacatattatcctgagccaaagatttcagagaaagcacagcatgaaatcaagaagattatctggaatgaaagacagaaaaaggcaaaatcagaaaagcctgaaacagataagaaagcataacta

SEQ ID NO: 1522 - DNA, 4973 bp, Unknown
  gut microbiota DNA sequence
ataagacaacggttatttttggcgtgaatggcgttggcaagtcaacaatccttcaggctatagatttattatatgctgatatcattgcaaagctgatgggaacggtaagaagtaagacagccagattcaatgaagattttattagctatggaaagtctgcggccggcataaaggcagatttcgattttggggatggcgaaagcatatattatgaacgcacaattgacagggctaaaggtgaaaaaagaaatacaagtgctcttaaaaaacttacagataagtttcaatcgttatatatacaaatgggttatgatgatggcaatggcaattggatagaggaatcggataataagagtatgcccatttttgttaattatggagtaaatagaattgtgcttgatgtgccggttagggctcctaaagagcagtttgtaaaactggatgcatttgacaaagctatagaaagtacgatagattttagaaatttatttaaatggttcagaaatcaggaagatatagagaatcagataaaggttagagatgattcaaaatatgaagataaaagccttgcagctgttaaaaaagcaatgttagctatgcttgagggatttgaggacattcggatagagagaagacctttggcaatgaaggtcaataaaaacggcaagtctttaaagatagatcagttatcggatggagaaaaatgcacgatagctctatttggggatttggcaagaagaatggcattggcaaatccgggtaaagatgtgaatcctttggaaggctcaggtgttgtgctcattgatgaattggatttgcatatgcatacatcgtggcaacgaaaggtattgaatgttttaagagacacattccccaatatccagtttattattactacacattctccgcagattttgggtgagatggatgattctgtcaatttattgtatctgtataatgaagataatgagattctatttaagacctatgaatcctttgtgggatgggatgcaaatgttattttagaggaagtaatgaatacgtcttcagttaatcaggatatcaagaaaatgattgatgagatgtataagtgtattgaagataagaagtatgatgaagcagagaaaatagtggatatattggataagaaaacaaatggttatgctgatggtatttctaaggcaaggatactaatatcaaggggtaaaagacgtgaaacaaattaataaaagaagtgcgccgcaatggtttgaacaatggaaatcagattttgtggaagttaataataggcaacctcattataaagttgatttcgcaggcaatgatagcgatggaattgaaagaagaagaatgctgcgcgaggctcttatcaatgagcagggcaaaatatgctgctattgtatgagaagaatttccaacaattcagctcatattgagcatttctttccgcaggagtcctttagagatatggacttaacatatgaaaacatgtttgcatcatgcaatggagaggtgacaattatcttagatgatgaacattgtgggcacaggaagaataattggtttagagatgatatgctctcaccaacggatgctgaagtagaaaaggtatttaaatattcagcaaacggcaaaattagtgctgttaggaatcgtccatcttctaatgttgctcaggatatgatacataatctgggacttgacagttttcatctcgaaagggaccgtaagcaggctattcaggcatcggaggtgtttgatgatgaggactatacggatgatgagattcgtagttttatagaatattattcaaataagaataatggtgaatatgagccttattgcaaagcaattgttgattgtttggaggagatgctttgatgattttaaagtggtagtgataaaaaccaatattgtgctaatttatacaaatattgtcgattacatttttagatacgtctgtttaaaatattatcgtattttaaacagacgtatttttatctattttaaggagatttcaaatgaaaaaagtacttataacaggaattacaggacaggatggttcttatttagctgagttcttattagagaacaaccgttgacaggtgcaatttatcataataaaaatagggctgataaaacagcatatgcgaaagtggttttataggataacgaagttctacagagaaatgttgttactttaaaggagggcaggaatgattggaagacagtaaattgcggtaagggtgtggaaaaatggcgcgagatttgtaaatcatctgatgaggcaaatgaggaacgtaatcagtggatatggtaaaaatcctaagcgtagctcgctatgcctacgcttttttccgtgcactcccccgcctaatatggtggtggtggcaatgccattaagctaggtgttcgaggttttgttcgaatgaaaaagtaaatacattgaattaggacgaatggatatttcgccatatgagttattgtcaggagcagagcatattggaaccagaagcagggataatcagacatatgtttttgcaaaagatactgaacttggaatggtagttgagacataccagcagttggattatgagcagcaaaagagacttttgggctatatggatgctttgaagatgaacaactagaaaaaatgtaattttataccatgtgatacgtaaaaacgaaaaaattcgtacaagagggggtgaagattatatattcaaatgaagagtactgggtatggttgtccagatgcaaaaagaataattcattctttatgattattttatttgattgaaataccgatacgtggtaatatgaatttgaaagagaggatataatggctaaggaaaatgttaatgaactggtggataaacttactctatttgatgatgatttaatgagtagagttttcgacaataatatcgaagcaacagagcttatgcttagaatcatattgggaaggaacattaatgtaattagtgttattggacaagatgagataaaaagtcatggagtaggtggaagaaatataacattggatgttcatgcgattgatgtgaacggcgatgaaattgatattgaagtacaaggaaattcggcaggggcacatatcagacgagcaagatatcatagcagtatggtagattctaaaatgttagacgaaggacaggagttcaggcaacttaaggattcgtatatcatatttatatataaacatgataaatttagaaagggtttaccagtatatcacatagaccgatatataagggaaacagaagaattatttgatgatggttcccatattatatatgtaaatggtaactataaaggtaatgatgaaattggacagctaatgaatgattttcgtcagacagattcagataagattcattatgctgcattagcaaaaggtgtaaagcattttaaggatactgaaaaggggcgtgagcaaatgtgtgaagcagttgaaaaatatgcaaaggaatatgcaaaagaatacgcaaaggaatatgcggtaaaggaaaagatgatttctgtgaaaaatcttatggagaatatgaaacttacagtggatcaggcactaaatgctttgggaattcaaggggatgaaagaaaaaccataataaatcaattacaaaaccgaaattaggatatttaagtagagatatattaaaaaatttttagaacataaatataagatgttctagattgaaatgctaaagagtgtcatggcacacccaaatagaagccccagtagctggaactactggggcttctatttaattgagctgctacaattaacagtggggtgaggcaccaatgtggtcaaaatagcgtcaacttaaggaaaagtcttaagttgatgtatgataaagttatcaaatagaagttagaaaataaagtaattcagaaaatgacgcactttaacaaggactccgtgaaagtcctattaattagtataatttttatttcaatcaaaaagaaactttttgattgttaaagtgtgttcgtccctttgctttattcttttttcgtttgaaagtacggcctggcattatttgagacctgttacggacagcttctgaataaagtttgttaatttcgtcgatagtactgatggtacacagtatttttgcaaactgcttgcaatttgcaatcaaacgaaatataatgaagaaaaaagaggaggcgatatctatggcaagaacagcaaatgtatttgcacgtgttgagcctgaagtaaaagagcaggcagagcaggtgcttgatcgacttggcatcccaatgtccaatgcggtaggaatgtttctgagacagattgtactccagagaggaattccttttgaaatgaaacttccggcttatgaggaacctgttgcatatggttctcttacaaaggaacagttcgatgaagaaatagaaaaaggcatggaagatattaaagcaggcagagtatattcagcagatgaagttgaagcagaaatgaaacgggaatttggtatatgaaatataaagtgatgtatacagcaggagccaaaagagatctgagaaatattttcatatatatttcagaggaactgttagctccggagaacgctgccggacagacagaccgaattatggctgctattcgaaagctggacaccatgccgaatagaaaccggctttatgaggaagaaccatggcacagcagaggacttcggttctttccggtggacaattaattggtattttataagacaaatgatgaaaatgaaatagtgtatatagttcgaattatgtatcgaggacgtgatgttcgcaagcagttaagccagacagaagacatttcagaaaattaaaatttaatatggaaccagaggtttgagcagttagtctatgaaaaataggggagctgcttttttcatacaaagtccatctgaagatgtgtgatttaatgagtggtgggggcaggcaccaatgtggtc

SEQ ID NO: 1523 - DNA, 3009 bp, Unknown
  gut microbiota DNA sequence
gaactgacattaagtatgatgaaaaggaagaggtggtaaatatgtgtaaggcatgggatgatcataaaaagcttggcattcaggaggggatacaacaaggactgcaacaaggaagatgccttgaagtatattcacttgttcaggatggtatattagagcccgaggtgggcgcaaagagagtaagtatgtcattagatgacttcgtagacgcaatgcaaaaagcgggctacaaaattcctgaattggtgtagtttgatagcttaaaagtataacagtaattgccccgacctatgtgtgttggggcatgatttttatatgacaggggaaagtagatgtatcttgtatctgtatattttgacaagacgacagagcatattttacaacgatatataaataaaatagctgagaaaacaggtaattcattcatgacggataacagtgtaccgccacacatgacgatatcggcaatagaagcccgaagtgaaaatgctttattgggagcaatggataatctgcgaaattcaatttctaatgggacgattagcattgtgtcagtgggacaattgctgccatatgtattttatgccacgccggtgcttaacggatatttacaggatttatcggaaaaagtatttgatgaggtgaaaagcattccggaatgtgcagtgagcagatactacaagccaatgagctggctgccacatattacacttggaaagacactgacaaaggaacagatgcagatggcattttcagtaatgcaggaaagctttgtgccctttgaagcggcaattacggagattggacttgccagagttaatccacatagcgatgtggtgcgatggaaattaaaacagcagcaatgaagccacagataaaccggttttttgaaaggataataaacatgataatagatagagaacgagtaaaaaacacattcgcagaatacacatcagggtacaacgccacagacccaaagattaagctcaaaatagaccatacctatagggtagcggagctttgcgagctgatagcaaggaatttaaagcttgatgaatatgagacagatgtggcatggctcacagggatgctgcatgatgtcggaagatttgaacagattaagcgttataacacatttaacgatgcacagtctgttgatcatgccaattttggagccgatctgctgtttaaggaaggacttatcgacacatatgtggatggatttcatgatgataaatacggcacaattgttgagaatgcgataagaaatcacagcgctttcaggatagatgagaggcttgacgagtatacggttatgttttgcaatatactaagggatgctgataaggtggatattttcagggtaaatatagatactccggcagaggatatatataatgtgacaacggaggaactgaaaaactcgcaggtgagtcctgaggttatggcagcctttgatgagaggcacgcagtacttcgttcctgcaaaaagaccgtggtagaccatgtggcagggcatattgcactgacatttgagttggtttatcctatcagccttcagatagcaaaggagagaggatatcttgacaaaatgatggcatttgagtcggataatgagattacaggaaagcagtttgaagagataagagcgaagctaaacgaatatgtggcgtcagtcaaaccattatagtgactaatgcagggcagatgaaaaatataggggaaagggatatggcaggctgatggttgatcatgttaagaagcttgccaaagcgcgtggctgcaaggcaatcatattggattcaggtatgcctcgaaaagctgcacatacattttatgagaagtatggatttgagaaaagctgttatgggtttgagtcgtttttggaatagcaggtagctgaaatataaaaatataatgacaagcttgcttctgtgtgctacaatcaactcaaagcattatatttctgtaaatacgacaccacagcatatttttccggtgtgtatcactttgaagagggcagaccacttcgcatttttcgacaaagacatggaaattttcaatgctttatgttaccagctaatagcaggaaaattgaaatgtcagatgtgaaaacattgcgagaaaagcggggtgcggggattttgccggcttttatattagcatacagtattttaattcgatttcgaattttcctgctcacacaagaagaggaggttaatttggggacaaaggactcgaaggcgaaggagtatttgtcagacaatacgaggttcagtgaaatctgcaattatgtattgtttgacggtgagaaggttatcaaaccggagaatttaaaggaatgtgacaccacagaggtgttatcagttttcggtattgataggaagcagattgttaagcagaaatggagagatttgctaaagggggtgtctgtaaaatatacagaatcagtatacatcgtactgatggggatagaggcacagacagatgttcattattcgatgccggttaagaccatgatttatgatgccatgaattatggagaacaggtcaacgaggcgaagaagcaacatcagaaaaacaaagattataaatcatcagatgagtttttatcagggtttacacttgaggataggctgacaccggtgattacaattacattatatcttggaacaaaaaactgggatggtccaagaagtcttgttgagatgatgcctcatatggacgagagatttcggccatttatcaacgattacaggattaatctgttgaatccactggagattacggatttttccaagttcaaaacaggactgagaccactgtttgaagtgctaaaaaatgcttcagatgagggaaagctgaatgatttaattacaaaagacgaaacctttacaagggttgacgttgagacgattgcggctatcaatctatttgtaggaactgacattaagtatgatgaaaaggaagaggtggtaaatatgtgtaaggcatgggatgatcataaaa

SEQ ID NO: 1524 - DNA, 8254 bp, Unknown
  gut microbiota DNA sequence
tttaccacataaatcattaaacacgctaaatttgtgctcaacggtcaaaaactaggaatgagcggtcttattaaccactcactcctagtttttatccgtttatccataaatagtaattttctcataaatgaagttataatatatttatttataatcttatacggaggatatcaactatgaagtctactggaaaatgcttatcagaaagatatgttttaaatggaattattgaatctcgtttttgtgatgcatatgcttacatttttgactacatatttaatttcatattatacaatttatcactattaactttaggatttttatttcaccacccgatagcagttacaatatatattattattgcaggatctttgcgtgctgtaaccggtgggtatcattgcaaaacacatatttcatgctatatactatcatatactgtattttctatatatcttttaactattgccactatacctatgatttctgcatatatcctgatacctttatatattatttgctggattttaatattagtggtttcacctgttgacacacctaacaaagtatttagtaagtcagctaaaaagacatctcagaaaagagcctatattatttttttgtttaattccatatttacaattctgtcacttttgttacactggaataaaggtttaatttttaatgatttaagtctcataatatgtgcaacaggtctttacaccggatatatttcaaatataaggaggcatcatgaatcttaatatagcaatatgcgatgatgatacaaacgatatcgcaataataaaaaaagaatattttacaatacacaatagaaactgataacaacattgtcgtatcatcttatttttcagcgagtgatctactttcagactacaaaaatcatctctatcagatagtacttctggatatagaaatgccagacataaatggtatggaacttgccaaacaactccgggatatggatgatgatctgttcattgtatttacaacatcctatccagaatatatgtacgaaagctttgaagtccagccatttcaattcataacaaaaccgatcgactatacagctatatccaagctttttaacgatattatcaaaaaaattaatcgaaattcaaaaagtatcgttataattgatactgatggtgaaaaaaattttgttccattaaacgatttgctttatatttcatccatgaaagaaaataaatcacatctcagatatcaacttactgacagctcattgatatccaaaggcactttatctgaagtggaaaatctcctttcagctcgaggctttgtttcaccatcaagaggttttctggtaaatttacaccagatcaggtcaatcaattccacacgacttttactgaataacgggattgaacttcctatcagccggagaagatccaaggaattacaaaatatctactctcagcacattattgatatattataaatttaaggagacaagtttatgaaaatagtattgttgaatttattggacagcatgatgtccggtgcagcaacctttatattttttcaggcaattcttggaaaaaagaaatccaaactgccatattatataatacttctcatatttgtatgcagctttactatttatgcagcaattacatctattttaattggcaatacatcgacactggcagtttatttacgtttaatcttatcatctttactttgtttctgcctaagttttctttattcagccaatttgcgaactaaaatacttatatccatcagtactactattttatgctctatctttgaagatttttcgtattacattattacaagcatttactcatatcgcgtcgaaaaagatactatggattttttagtattctccaatatatctcttatggcgactatgtttttccttattttttcaatactgattcattttgtctggaaaaaggaggcttttgttcattctttaagttatacaataattttattggttattccggtactttctatgtgcctgttactatcaaaaccaattttatatctaaatataaacattccgtctgcctttttcattttagcagcctttgtattgtttataaatattatgaattatatattgttttacaacgtcctcgaaaacgaagagctccgctttcagcttaccatccaaaaagaacagattgaatttcagcgcaacaaatacgagcaactgggtgctgcctacaaaaatatacgtagctttatgcacgacaccaaaaagcatctgttttatattgaaaattgtgttactgagaaaaaatatgacgatataatcccttattctaaagagattatgcacgacctcgaatcacgctattgtactattaatacaggaaatctcgttatagatgcctttgtaagcaacctgctgcttcagacaaaagcccaaggtatcactctgcacaccaatctgaaatttgacaaagccactattcctgtcaatgattatcacctgactatcattctcggaaatctgcttgataatgcgcttaatgcctgccgtggacaaatcggagcaaatatcaaggttgcggtaagaactgtagacggcacctttaccatacacgttgcaaacacatatgtgattgcagatcctgacaaggcacctgatgattttgaaaaaatagattttattcacggatatggtctgaaaaatgtaaaggactcagccgaggcatgcggtggtttctgcgtgatcaatcacgaaaatgatatatattccgccaccgttataatacctgttctgaatccttgaatcaattcatccacaaaaaggatgaactatccctctgaaatccgacaaacgacacgattttctacaacaccttcgaaccatttgccgtaagcttaaaagttgcacctagtacctctgctgcgccacgacacatcatcattcgacccaggaaaatttcaaaatactcatacatagagcagattttcgtatcaatctgcagattaagcgctatgacttttttatccatatttatcttaagagctgcatctgttactgcataatttaccctgtcgtgtatatcaaaattttcttttgccttgttccttacacggtttctgcgcacatcggttttatctgctatgatgagtgctgctgaaataggatccgttgcccctccggttgactcatcatgatgtcctatcgcagacacaaccgttatcctatccttcagactcatatctgtttctttgagtatctcgtttgccagtattgcaccatattccgcatgacggcttctgtttaccacatttccgatatcatgcataaatcccgcgatttttaccatttcaatatcagattcgctgtaaccgaatttctttaatatatatgctgctcttttggctaccattgtgcaatgagctgccgaatggtctgtaaagcccaatactccaaggttttcattccctttctttaaacattcacagacctccttgttcttttttatctcatcgtatgtcaaattattgcctcctgttttgttacttaatcataaattatagtctgcttttcataaaaatattcgtgcatgttttgtaatctttatttctgcacttataagcgtaacaaataattgaaaatatattgaggtggctgtgtaaaatttgtgagaaattttctatttactattgatatattttgcattgacatattttcttcctttatgcatatatttgactaaaaaatatgcagatactcaataagtatctgcacattttctaagtaatattatgcattaaaggttcaaaaggtattttaccctatcgtataataatatacgctgtatatgccgcatacattagcagcatgatgataccctcgcctctttttatctcacgttttgtccatgccataatccacacgatgagcgaaaataccacaagaacgataatatctatgatattttcctgtatgaatgctatcgggctgatggctgatgcaattccaagcaccatgagtatgttgaaaatgcatgagccgactgcatttccgagtgccatatcgacctcattttttctggctgcgactattgatgtcacaagctccggaagcgatgttccgatagatacgatggtcagtccgacgagtgtctggctcattccaaggtcaatcgctatgcggcttgcactgtctactacgacatctccgcctactgcgatgccgacagctccgattagaatgaaaatcactgcttttggcattgagatgagaggtatctcatcgacctcctcatctgatgactgcctgttctgctttaatgtgtgtctgataaggtagataatatatcctgcaaagcagccgagcagtattattccgtccactctgccgagtgtcatgccgattgttcccatgacaagaagtaaaatggcacatatcatcgagaatgggaaatccctttttaatgatgctccgtccaccactaccggtgtcatcaaagcgcacacgccgattactaccatgaggttaaatatgtttgagcctgtcacgttgctgactgcaagcgtattattgtgtgctatggatgctgccacactgaccgctgtttcaggaagtgaggttcccatcgcgacaattgtcagtccaatgataagtgacggtaccttgaatcgctttgccacgcttgagctgccctccacgaacaggtctgctccctttaccaaaaacacaaagcccactatgaggcagagcagcaccactataaacggtgcattattgatgaaattttccatgttgattcctccattttttatttttgtattctatattatttcatttcttatagtatctgaaatgtaatcccagccacagtttatgtcatatcataacacgctcattaaaagcttataatacctaggtgctcaagcaatatcttcacacctatgagtatgagaatgattcctccggctatctctgatttctttttatatttattgccgaaaaagtttccgactatgactccgatgattgagagcacgaaggttgtaagtccgatgattgcaatagcccagtagatgtttaagctgtcataggtaaatgcaaacatgattccgactgcaagcgcatcgatgcttgtcgcaattgcaagcagaagcatctctccctgattgagcgccaggtctttttccacgacagagtcatcatccttttccttcactgcctcataaaccatcttgccaccgataaagcccagcaaaatgaatgctatccagtggtcaatgcttgtgatgtacttctcaaaccggatgccaagcatatagccgataaacggcatgagcgcctgaaatcctccgaaatacagaccgattgtcagcgcctgctttctgtttacctttgtcattccaagtcccttgcagatggatactgcgaaggcgtccattgacaaacctactcctatgagcaggatttcaataaataataccatatttttctcccttttgcctagtgtgcggcgattaatttctcacggataagcatatgaaaaaatgagaccctcgcatgcagacacgaaaccttataaagctataattatatggcttatatagctttattgtgtgctgcatacttgagtctcattctttaatgtttgccaggtctattgaccggtctgttgacaaaccacgtatatgtaatgatacgcgaactactccctcagaggtagtgtgtatttaattaatcgcctttgcttctaaaaaaatatatcaaatgacatgggctgtgtcaatgtattttaccgctaatttttgtacggaatggctaactttttaaaataatcaaaactacccggaacattttttacaaaacaaattttatacagacttacacaactaattattttaaaatcatggttgacacgaaaaacaacatgtgatatgtttactacgacagacatagtatgacactcgtagtatgttactcgtagtattgaataattttaagatgaaattaaacacttgatacaggaggtgaataatgctcaatataagcagcgatgtcatccgcggatacaacgataccatcatactctacctgctcctcgacagaccatcctacggctacgagatttcaaagcagataaagctaatatccgaggaaaaatacgtcataaaagaaacaactctctactctgcatttacccgccttgagaaaaacggttatatcacatcattctcttcgagcgacaatgcaagcggcaaaaggcggacctactatcagattaccgatgccggcagagaatattacaggatgaaatgcgaggaatggaagctgacacttgatgtagtaagcaaattcatacgattttaaaggagacattttatggaaactataaagaattatctggaaaatatgttttcgcacctcccgaatacccccgaggtgcaaaaagccaaatatgagctctatcagatgatggaggataaatacaacgaattaatatccgagggcaaatccgataacgaggccataggaatcgtcatatcagagtttggaaaccttgacgagctcgccgactcactcggcatcaaaagcttcgtggatcccagtcaggcaatgcctgccgccaaaacactctcccgcgagactgcagctgcatttctcatggattcagcaaagcacgcatatctcactgcctttggagtgctgctttgcataatcgcaagtcttggaccgatattcagcgaatgcattccgcgttcactcgcttcaccggacgcatctgatgcaatcggcatcacgttcctgttcgtttgtatcgctgtggcagtcggcttctttatcttctcaggttctctctcatctaaatggagctacctgaaaaaagagccttactgcatagactttgaaacagcaaactgggtcatcgagcgaaaggaaagctaccgctccacacatgcgatgcttttaacagtgggtatcatgctctgcatactctgcgcagtgccggcaatcataatcagctcactgaacaccaaaagcaccttcgcagactcactttcaggcggactcgtgctcgtgtttatagcaatcggtgtattcatgatagtattcacaaacatgaagaaatcaagctttgacaagcttctttccctaaacggagcacagactatgggcggtaattttgccaattcacacgatggcaaggtgcactatgaaaaccctgttgtggctgcaatcatgtcagtttactggtcaacagtcacatgcatttatctatgctggagctttattacctttgactggggtatcacatggattatctggccaatagccgcaatcatcaattcgctggtggaaaacctgctcggcgataaacatggaaattaacggaaaccaggacagtcaaaaatgtgtgtagcatattttgaataattacaaaacaaattatgcaacaagataattcagaaatggagacaagtcatgaaaaagaatatatatctaataataattacaataattaccgtggtctgcatcatcgccgggagtctctaccatatcgggggctttgctctaggcctgtttgacaatctgattcctcgctcagacaagtctctcggaaacgtatgcacagaggagctttcagtcgatgaattttcaaacctggtatttgatacaaccatatcgaacatcaacgtgaaaaccggtgacagctacatggtctcatacaaatgcaacaagcgactggttccaaagattaagagctccggcgataccctcacaatatcccaaagcaaaggagccaactacagaagaaacaccacaagtgaaatcactgttaccattcctgagggcacagcattgaacaagctctcctttgataccggtgtaggcgaggtaaaccttaattccctgaccgcagctgatgctgaatttgacaccggcataggcgatttatatgtcacagactgcatcttcgcgacatgtgatgtggatggcggaaccggcaatcttagctttgaaaactgtgcctttgacgaaatggatatcgacggcggtacaggtaacatcactgtgacatcctcacagtcacttgacagttacatgatggacctggactcaggtacaggcgatatcacaatcaacggtaatgactataatgatgagtatgaggtaaatgagcatgccaaaaagcacctggttatcgactcggggcttggggatattgaggtgaggtattagtaccatatcatccgataattt

SEQ ID NO: 1525 - DNA, 11799 bp, Unknown
  gut microbiota DNA sequence
agaaaagagcatatctgaaattgagaaaattgtaaagaaagagcctgcaatggcgtaactatcattagcaaaaataaaacgttaattcttgcataacttcatggtatatgttacgattttaatgttgttaagatgaatctaaaggatgatgcttgcacgcatcatcctttttaaatacaggagaagtaaatggatatcaaaagacaggaaagagcaccgatttatgaggctcttgaggagtttaagaagaaaagagtagtgccgtttgacgtgccgggacacaagagaggcaggggaaatcctgagctggtgcatcttctcggagaaaagtgtgtaggacttgatgtcaattcaatgaagccgcttgacaatttgtgccatccggtttcggtaatcagagaggcggaggagcttgcggcggatgcctttggagcggcaaatgcttttcttatggtaggaggcaccacctcagcggtgcaggccatgattttgtccacctgcaaggcgggagacaagattatacttccgagaaatgttcataaaagtgctcttaatgcactcgtgctctgcggagcgataccggtttatgtcaatccgcagatgaatgcgaagcttggtatttcgcttggaatggagattgaccaggtggcgagggctatcgaggaaaatccggatgcaaaggctgtgcttgtaaacaatccgacatattacggaatctgttctgaccttaagtcgatagttgcgctggctcattcgaagggaatcaaggtgctcacggatgaggcacatggtacacatctttattttggaaaggggcttccgatatcaggaatggcagccggtgcagacatgtctgcggtatcgatgcacaaatcaggaggaagcctgacacagagctcgattctgctcaccggaagggatgtaaatgctgattatgtgaggcagattatcaatctcacccagaccacgagcgcatcgtatctgctattgtcaagccttgatatatcaagaagaaatctggcactcagaggcgaggaatcctttgccaaggtggcacagatgtcggagtatgcaaggcaggagattaattctataggcggctattatgcgtatgggcgtgaccttgtaaacggcacgagcatatatgattatgatgtgacaaagctgtccatctatacgctcgatatagggcttgccggaatagaggtatatgatctgctgcgtgatgagtatgatatccagatagagtttggagatatctgtaatatacttgcgtatatatcaatcggtgacagaatacaggatatagagaggctcgtaggtgcgcttgaggatatcaagcgcctttacagcaaggacaagaccggacttttgtctggagagtacataaatccaaaggtggcggtatcgccgcaggaggcattttattcgcagaagaaatcagtgcgcattatggatgcggtaggcgctgtaagtggtgagtttgtcatgtgctatccaccgggaatcccgattcttgcaccgggagagcttatcacaaaagagattgcgcaatacattgtctacgcaaaggaaaagggctgttcaatgcagggaacagaggatcctgcggttgaatatcttaaggtattggagcagtaaacaggaggaaaagctatgcaaatgtggttttcacaatatcatactgtcaatgtcaagctggatgtaaggatacaggagcagcttttttcagggcagagtgattatcagaaaatagatgtgtttaaatcatatgagtttggcaaaatggtcgcgctggatggcgagattgttttttcggacacagatgagtttatatatgatgagatggtcacacatgtgccgatggcggtccacccgaatgcaaaaaggatacttataataggtggtggcgatggcggcgtggcaaaggagctcatcaaatatccgtctgtcgagcatattgatgtggttgagacagacaagatgtttgtcgatgtatgcaggcggtttttccccgaggtagcatgtggacttgaggatgaaagaatttccatgttttatgatgatggtctgcgattcttacgcagaaagcatgatgaatatgatctgataatcaacgattccacagacccgctcggacatacggagggacttttcacaaaagaattttacggaagctgttataaggcactaaaggatgatggaatcatggtttatcagcacggcagccctttttatgatgaggatgagcttgagtgccggaaaatgcacagaaaggtgtataaatcatttcctataagcagggtatatcaggcacatattccaacttgtccgtcaggctactggctgtttgggtttgcatcgaagaaatatcatccgctttatgatctggatgcaaaaagatgggatgcactggggcttaaaacctggtattatacaacacatttacacaggggagccttcatgcttccgaaatatgtggaggatttactcgaggaagaggaaacaaagtaaaacaaattagaaaaactatatcgtaaccaaagcgaatcaggaggaacaaaaatgagcagattacttattatcggatgtggtggagttgcgcaggtggcaatcagaaaatgctgccagaacagcgaggtatttaccgagattatgattgcaagcagaaccaagtcaaaatgtgatgacttaaaggcaaagcttgagggaaagacaagtacaaggattgagacggcaaaggttgatgctgacaatgtggatgaacttaaagcgctgattagctcatacaagccggatgcggttttaaatgttgcgcttccgtatcaggatcttacaattatggatgcatgtcttgcgtgtggtgttgactacatcgatactgccaactatgagtgtgaggatactgaggatccgaagtggagggcaatctacgaaaagcgctgcaaggagcttggatttacagcatattttgattattcatggcagtgggcatatcaggagaaatttaaggatgcagggcttacagctattcttggaagcggatttgacccgggtgtgacctctgtttattctgcatatgcgctgaagcattattttgatgaaatacatactatagacattctcgactgcaatggcggtgaccacggatacccatttgcgacaaactttaatccggagataaatctgcgtgaggtttctgcgaacggctcatactggacagatggacactgggtagagacaaagcctatggagtggagagcgcagtacaattttgaccaggtcggagaaaaggatatgtatctgcttcaccacgaggagattgagtcactggccaaaaatattccgggaataaagagaatcagatttttcatgacctttggacagagctacctcacacacatgaagtgtcttgagaatgtcggcatgttaagaacagacccaatcatggtggacggaaaggaaatagtgccaatacaggtgcttaaggagctgcttcctgaccctgcatccctgggacctcgtacagtcggaaagacaaatatcggatgtatttttacaggtgtcaaggacggaaaggaaaaatcaatctacatctacaatgtatgtgaccatcaggagtgctacaaggaggttgagtcgcaggcgatttcttataccacaggtgtgccggcaatgattggtgccatgatggtggtaaagggactttggaagaagccgggagtgttcaatctcgaggagatggatccggatccatacatggaggctcttaataagttcggactgccttggcaggtagtggagaatccggttcctgtggattgctacaagactgaggatgagtcagtacatatggattagtccggaggccagtatgaagataaatgaattaagaactccctgttatgtgatagacgagggaaaattaactgaaaatcttttgatattaaacggtgtcatgcaaaggacaggtgcaaggattcttctggcacagaaggcattcagcgcattttatgaatatcctcttatcggcagatatctaagcgggacaactgcaagcgggctttttgaggcccgccttgcacatgaagaaatgggaaaggaaaaccatgtattctgtcccgcttttttgccgcaggagatggatgagctggtagaaatatgtgaccatattgtatttaattccgtatcgcagtatctgcttcacagggataaaatagaaaaggctgataaaaaaataagtgtcgggctcagaataaaccctgagtgctccacacaggatgggcatgagatatatgacccatgtgcgccgggctcaaggcttgggataacgagagaggcactcgataaggctattaaaaacgggcttgatttatcacgtattgagggctttcattttcacacgctctgtgaacaggattcggatgcgctcgaaacgactcttgcagcggtagaggagaaattcggagatttgctgtatggacttaagtggctcaatatgggaggcggacaccacatcacaagggcagactatgacattgagaggcttgaaaaatgcattatgcatatgcgtgacaaatacgacctggaaatctatctggagccgggagaggcggttgcgcttgatgcaggatatttggagacaacggtgcttgatatagttgaaaacaatggcataaagatactcattctggatacctccgcagcctgccatatgccggacgtgcttgagatgccgtaccgtccgccgcttatggatagtggcgagccgggtgagaagaagtatacctacagattgtcctcatgtacctgtctggcaggtgatgtgataggggattattcatttgacaaggagataaaaaccggtgacagactgcgcttttgcgatatggcaatctactcgatggtcaaaaataatacctttaacggcatgccgcttccggacattgcagtaatggatgaaaataacgattgtaaggttatcaggagattcgaatatgaagattttaaatgcaggctgtcctagagcagacggcttttatatgccggcagagtatgctccccacaagggtaccatcatcatctggccaaagcgcccgggctcatggatttacggtgccgggcgggcaagagaggcttttgcggaggtgatatgtgcaatagcagagtctgagcaggcatatgtgctcgctgaggcagatgtgatagacaatgcaaggtctgttgtggaggctgtcagaaagcagaaaaattatcaggaaaatttcccggtgaaatatatacaaatggagtcagacgatgcctgggccagagacgtgggacctacctttgtgaaaaatgaggagggcgatgtcagaggaatcgactggtgctttaatgcctggggcggcaaggtggatggcctgtacgcagactggacaaaggatgacagagtagcggctttattttgcaacgaaaccggatatgacatatatgatgcgcatccgtttgtccttgagggtggagccatccatacagacggagagaaaactgtgatagtgactgaaagctgtctgctaagcaagggcagaaatccggaattatcgaagtctgaaatagaacagaaattaaaggattatcttggagccgaaaaaatcatctggattccttatggaatatacaatgatgaaaccaacgagcatgtggacaacgtatgtgcattcacaagcccgggacatgtggtgctggcatggacggatgacaaggatgacccacagtggcagatgtcctcagcagaccttgaaatattggaaaatgaaactgatgcaagaggcaggaaaattgaggttcacaaggtttacattccaaagaatccggtgtgtatcacagaatatgagctttcgggattcacctttgaggagggtgaggatgagcgcgaggcaggagaacgcttagcggcaagctatgtgaatttttacatcacaaacggcggtgtgctcattccacagtttggtgatgtgatggatgagcctgcgcttaaagcaatcggaagcctttttgagggaagaaaagtgtatccgatatatgcgcgtgacataattgtcggcgggggaaatatacactgtatcacacagcagataccgcagtaatttaattcaggatgagaaaggtgaatagtatgagagaggttacaattgctgcaatccagatgagctgcagccgtgacgtaaaagaaaatattgaaaaagcagcaaagcttatacgggctgcggcagaggccggagcacagataatacttccttcggagctttttgagagacagtatttctgtcaggagaggcgctacgattattatgactatgcaaagccgctttctgaaaatgctgcggtgcagagcatgaaggcactggcaaaggatcttggcgtagtgattcctgtgagcttttatgaggcaggagagggcagacagctcttcaactcggtggcggtgatagatgccgacggagaggtgcttggaatatacagaaagacacatatcccggacgatcattattatcaggagaagttttatttcacaccgggaaataccggatttaaagcttttaagacaaggtatgcaaccataggagtcggcatatgctgggatcagtggtttccggaaacagcaagaggcatggctttaaagggcgctgagatacttttttaccctacagccataggcagcgagccgatactggaatgtgacagcatgccacactggagacggtgtatgaccgggcatgcagcctgcaatctgatgccggttgtggcggcaaacaggataggcacagaggaggttgtaccgtgtgcggaaaacggaaaccagagctcagcactgacattttacggatcttcgtttatcacagacgcaaccggagaggttgttgaggagatggacagagtatcggagggcttcatactccacagttttgatttggatgagctggagagtgagagaaagagctggggactgttcagggacaggagaccggagatgtatggggagaattagcttagattaccctaatgattgcaaattaatttaaagttaatttaaaaacacaggatacagcaaaggcgctatatcctgtgttttttggagttccctattagtgtattagaacatcggaaaaaatacatattattgcttcaacagcactttgatgtcttcctccggtgtggtaataggtgcaatcccatagttttctaccaggaagttcagaatgttaggagaaaggaacgccggtagagaaggaccgagccggatattttttataccaagatgtaacagtgttaagaggatgcagactgctttctgttcataccaggagagtacaaaggaaagcggaagctcgtttactgaacatccaaatgcatccgcaagtgctattgcaacctgtatcgcgccataagcgtcattacactgtcccatatccatcagtcgcggaagaccaccaatttctccgagatttagatcgttgaaacgaaattttccacatgccagagtcaggacgatactgtcagaaggcgtctgttttacaaattctgtatagtaatttctgcccggtttggcaccatcacagccggcaaccaggaagaaatgacggatagctcctgattttacggcctctattaccgtatccgcatgggacaggattgctgaatgaccaaaaccggttgttacctgtgtgccgccatttatgcctgtgaaggtctgatcatccttgtaaccaccgagctcaagtgctttttcaataacaggagtgaaatccttctgttcatcgatatgaacagtacccgggaaggcaaccacttctgttgtgaacactctgtcgatgtagctgctttttggaggcatcagacaatttgtggtgtagagaataggagcaggaatatgatcaaattctttttgctgattctgccatgctgttccgaaatttcccttcaagtgagggaatttctttaagagtggatatgcatgggcagggagcatttcaccatgagtgtagatattgattccctttccatttgtctgttcaagcaaaagctgcaggtcctttaaatcgtgtccggttactacgataaaaggtcccttttccaccgtaagcgtaacatctgttggctccggtgttccataggtttgtgtatttgccttgtctagaagtgccatgcactttagattgatttcacctaccttgagaactgttggaagcagttcatccatactttctgcgtaaccaatcttgaacaaggcttcacagaaaaactgatttacctcggaatcttcaaaattcaggacatatgcatgataggcatatgcagccattccgcgaataccaaagagaataagtgacttcagggaacggatatcttcattagcattccatagctgttgcatatcatattcgtcagttcgtccacaaggagactgacatttattacagttgccaaccagagaggctttttctgctctgaccttttgtatcatatcttcgattgctgcattatcaaagcttacatttgtaattgtggtaaataagccctcgataatggtctgccaggtcttttttgaaacagctgatgtgtcatcgacagctctcgccagaccaatcagtgcgcctgtcaattcatcctgtaattgtgcagtatctgccttttttccgcagacacctatatttccggtacagccggtgcatccggccgtttgttcacattgaaaacaaaacatctttttttcctccatcagtagtttttttatgtttctgatagaataatagcgttataaaaacaacttgtatgtttgatttccaacataaagaatacttttgaaaaaaattatctattacaattagaatagttttttcttaatcccttaacaataataaacatagtcacaaattcagccgccggaaaagcaagccacacacctgtcatgccgaaggcggctgaaagtgcgaatgcgaaaatgcttatagcgataaaaccacgcatgatagatgccgcaaatgcatattttacggactcaacggcgcttaggatagcagaacctactatattaattccggcaaaaataaagcctgtaaagtaaaggcgcagtccgctctcggcatacgaagcaagcctggcatcgtgctcgctgttgaaaacagatgtcacaaaaggtgcaaaggtgcatatgaacaaaatgagcagtgcagcaattaagagagatgaaacgacagccatcctgagtatcgaacctacattttttctaagtcctctgccgtaatagtcgctgataagaggctgtgaaccctgtgctattccgttgaacaaagctacagctaccagtgacgtattggcaaccacaccgtatgctgccacgccgatatttcctgcaagcctcaggataaccatattgaagacaacagttatgacacctgatgatatttcagcaacaaaggaagaaacaccaacctggcaggagtaaaagagtctcttgacagatggaaccgtcggcttaagctttacggagcatttgtctgagcagaaatgaatacagcatatcaggatgcctataatcggtgaaatagcggtagctaaagcggctccctccataccaagtccaagcgggaacatgagtatgtaatcaaaaacaatattaaaaaggctgctgaaaagtgtggcgcacatggcaatggatggtgcgccatcatttcttacgaaagcgttgcacacatagttgcacatgaaaaacggcgtaaaaagcatgaaaatacgtgtatagtttttaccggtatttataattgctgaatctccgccgagcagccctacgagcctgtccggaatgaaaataccaatcaatatgaatataacgcttattataatacaccacaggagggcatgaaaaaagtagctctcgctggatgtgtcgcccttatttttctctacgacatatctgatagcggagccgactccgatcattgcgcctatggcaaaaatcaaattgtatacaggcagcaccagattgagcgcggtgataccgtttgagccgaccgcctttgatataaagaaggtgtcggcaagtatatataatgacatacccaccatgccgagtatgttttgtgagacatattttacaaataattttttcataatagctatattgtaaatgcatctgtcatttaaatcaatgacaattttttgtaggtcgggatgagttcaaaatgaggcattttgactattgaaatattttttccggtaaattataataaatatgttgaaaaaaattgggattactaaaggaggataattatggaaaacaataagctttcaacaggtttaaccgtatggttatggattattttcgtggtgaatgttcttgcagcaattggcggtattgtcgttgcactgggtgcttcagtcgtaggagctgctttaggattaggttcgatatatgtcgtactgagtttcattggcgttatactacagattgtcataactgtttctatcggtattttgcttttcgcacacaaaaagattggtttggtgcttatttttgcatttgcagccctgggattcattgtaagtatggttacatatgccgttacagcacagcttggtgttggtaatattgtcaaagcaattatttcagccattcttatgccggttattacatatttatttgcaaagaacgacattgcaaatggcacaatagcttagagcaataaaaaataagatgaaaattgaataatgttttattaatccgctatacgataggtgagtatagcggatttttaagtttgcgcgccatgggcgcgctctaacgggtgcaagtcccgaatactcctagatagtgggaagtgtatagccgaacagcaagggtgtctaccgtgaggtagaatctgaaggaagctgtaagcaaatctctggtacgacgaacagaaatcacatataaggctaggctacgagagataagttggcttaaagcaagaagaacaaaaaagcaagtaaatgtagaaaatcaggcaataaagcttctgtcaaaagaagaattgatcaggaaaatagaggtgattaaaaaagaactgagatcctatacctggcgagacttggaaacaaatggtaagtttgctaagaatgataaactctccttcattacggatgacatgcttatagcaggatgcgatataggcagtgaaactcattatattagggcaatcgatgtcagatgaagagaattacgtaatggggcattcgagtttagcaatacttcagaaggctttgcgaatgccaaggcatgtatgctggtacttgcggcaaaaatggtgctgcagctgacaatttaacattttatccagaaaaatatattgacaaaaatgtgcaaattcaataaaattattaaccataagggcacacttatggaaacatagggtcgcaaagccagagtctaaaacagttacatgtagtaatgacagttcggctgcaacaaccggtgaataccggttgctgcagcttttttgtatgtatgaaaagtttattgaagtatgaggtgaaaagatatgaatgaaaaatttgattttctgccacttgggagcattgtagtagtaagcggtggcataaaaaaatttgtgattgttgcaagagcactgcaggtaaatataaatggctgtaaacagttgtttgattatgctgcctgtccatatcctgagggaatgaatggtgacaggcttatgtattttcagcatacagatatcagcagggttgtgtttgaagggtatgtagatgatgatgagataatga

SEQ ID NO: 1526 - DNA, 1622 bp, Unknown
  gut microbiota DNA sequence
tgtataatcccatacagaatctagtaagtgaagcgttagcttcgggagagcatttctgcatccacggacatggtttataaactcatagtagattgcttcgcataagtaccctaaatttaccggagagtatgcggtgtgttccgaagaaaaatataaactgccacggcgttccataaaatgtggatacgacaattcatagcaaactatcaataaactatccgcaaatgctgccgtggctgattttatatttttctgaggaatatactgcatgctaggccggtatccacagcctagatatgcgaagccccataaacgaagccccataagcgatatcctatgatgcgtccctacagatttgtattcaccccatttatggtggcattctcattctccctcataggaatgacgagacacttctccccattgatgacctgcgcatgaatctgtgaagccttctccggctttacatgaagcaccacatcataggtcttaatttgagaagtgtaattatcaatctcttcctgcttctcaagaagctgtgaggtgcgctcttcaatctgattatttttctcctggataacagaatccttctcctcaagctgcgcatttttttcattgagctcgagagttaaatcgccgacttggctctcaagagcaagcttttccacgcggatttcattagctgcaagagcctttgaatcaatgacattggctgcgataggcggcttgtcaccgaaggcctcattgacggatttttcaatgcgtgaaatcttttcttcagagacatggcagtcactaagtaccttgttcatagcctcgctgtcgagaatgaacggatcatcgtcatcatcgtgagtctcagcgtagtcatcggccatctcggacagattctgctggatatcaagcagcttgtcatcagtgctctcgtcctcagcacccagcacgtttctgacgattgaatgaaaagccatcttctgctcagtagctgtgcgctccacaccgcagccgaggccgtttgtcataaactcagagtgcggctccttggtgtttttcgtatagaaaagagtggagtgtatgtcagtgcttctatcgttgaaggcagggaataaaaagcctgtctcaggagcgccgacaacccagtcccttatgcgggctccgatacgctgctccttttccagatagccaaggcccggctttgaaagtgtgacagggcagatggcgcagagcatgtatttgtacacctcctcggactcatccacgttgatgttgtcctttgtacgtgtcatgacatcgtagctgtcgagatacaaaagaatcagatagtttccggcctcatcgtaggtgtcgattaccaggtcatagtatgtatcgagcagagtctcatcattaagctcgctgtcgcgaagcgccatgagaatctgctggcggcctccgacctcttcctcctcaagcggaaactgcagattgagcaggttgtttccgagagtgccggaaagtaccttgtttgaaatctccagatatttgtagtattcatcctcctcaagagtgagaaatttgccaccgaatttgcagaccttttcatggttgcagtccacgtagcagccgaccagacgactgaaggt

SEQ ID NO: 1527 - DNA, 17409 bp, Unknown
  gut microbiota DNA sequence
ttaattgtatttttattttcatcccattcaaaaattatattctccataattacattataagtacgaaataattatttgtcaatcaagaaaaaagatgacagaccaaccacaaaatgctataatttaggaaatcgacagattatgatataaaggctgatacagagacatccacaggtgtctctgttcttggattgaggcataaatggagcagaacatgacaaacaatcacattacaataggcattctcgcacatgtagatgcgggaaagacaaccctgtctgaggccatgctctacagcaccgggcagatccgctcactcgggcgcgtggaccatcaggatgcatatttagacaacgatgcgcaggagcgtgagcgtggaataaccattttttcaaagcaggcaaggcttgatatttcgcgaggtacaaatgcagcagatacagcagatgcaggacgcacagcaggtagagcagatgcagcgcgcacaacaaatgcggcagatacagccggtgcatggcatgtagtgatgcttgatacaccggggcatgtggatttctcggcagagatggagcgtacccttcaggtgctcgactatgcaatacttgtaatcagcgcaactgatggagtgcaggggcacacgcgcacactgtggagacttttaaagcactataacgtgccgacatttatttttgtaaacaagatggatatgcagggcacggatgcggagaaagtgcaggcagagctaaagagcgagctgagtgatggttgcgtggatttttcttcacaggatttatttgatgagcttgccatgtgcagcgagcctcttttagatgaatttatggaatcgggagagcttgcggatgcacatattgcgcaggcggtggcgcaaagggaggtgttcccctgcttttacggctcagcgcttaagcttgacagagtggatatgctgattcagggactttcgcgttttatgtgtgaaagaaattaccctgacaaattttctgcccgcgtatacaagataggcagggatgacagaggcagcaggctgacatttttaaaggttaccggaggctgtcttagagtcagggacaaaatagagtacaaagcgcatggcggtgacgaggcgaaaggccttctgattgaaaaaatcgatcagataagaaagtattccggcgaaaaatatgagatagctgatgtggcagaggcgggtgagatagttgctgtcacaggtcttagctcgacatttccggggcagggactcgggtttgagcagcagtccaatatgccaatccttgaaccggtactaaactataggatgattctgcctgatgatgtaaatccggcggcatttatggaaaagctaaagcagcttgaggaggaagacccacagctttacatagtgtgggtggaggagtttaaggaaatccatgtgcagctcatgggacaggtgcagatggaggtgcttgtgcgtctcataaaggacaggtttggtgttgttgtcacgttcggaccgggcagcattgtatataaggaaacgatagcaagggctgtcgagggagtaggacatttcgagccgctgcgccactatgcagaggtgcatctgcttttgtcgccggcggagcgtggcagcggaatcacagtcacatccacctgcagtgaggatgtgctcgacaaaaactggcagcgcctcatagccacacacgttgaggaaaaggagcacaggggcgtactcacaggctcggcgcttaccgacgtgaaggtcacgattcttacaggaagagcacatgtaaagcatacggagggaggcgatttccgccaggctacatacagagcaatccgccagggacttaaatccacagagagcgtgctgctggagccatactacagctttattctacaggtgccgatggagtatgtcggccgtgcgatgacagatttagagcagagatttgcaagagccgagagcccgcagtttgccacaaccgctgcgagggagatggcgacaattacaggaaaggcaccggttgcgacaatgcaggattatgtgagtctggtgcatgcgtatacaaaggggcttgggcacctgacactggagctgtggggctatgatgagtgtcacaatcctgcggaggtgattgcgcagatgcactatgacagcgaggaggattttcgcaatccgacaggctcggtattttgtgcgcacggctcaggctacgtggtgccgtgggatgaggtcccggagcatatgcacctgccgtatgtctaccacggagatgagtctgaggaggcacttgcagcgagtgcccgcacgcagaatgcattttcagcggaggatgcgcaggcgcttgccggaaaccgccgcaggatgagctttgagaaagctgtttcaggtatgtcatcagtggagcttgatgcgcagcttgcagatgtttatgccagggagtttggcatgggcaaaaacgatattgcagatgatcagaggcgcaaatggtcaggtaaaaagaaaaatgagtatgaaggtctaagtggtaaaccgcgcaccgtaaagcatgataagcacggcaatccgatttatccgaagaaatccccgggggaagagtacctgatagttgatggatataatataatatttgcatgggaggatttaaaggagctctcgcgcataaacattgattcggcgagagatgcgctgaaggatgttttatcggattaccagggctataagggctgtcatctgctgctggtgtttgatgcgtacaaggtgaagggcaatgccggaaagagagagaacttccacaacatagaggtcgtgtatacaaagcaggacgagacagccgatgcatttatcgaaaagactgtgtttggcatacgtgacaggtacaaggtaacagtggcaacctctgacggactggagcagcagacggtcatgagcctgggggcactgcgaatgtcagcccgcgagcttaaggagcatattgagatgacgaagcgtgccgggatggaggcattcatatcaggataagctggcatgaatggtaacaatatgtgtataaatagatgtttataaagacatttgtatgtcataagctaagataaggagacaagaaaatggtagtaaacgaaagcatgtatcagctcggaagcgtgcgctcagcaattagggagcttttcgagtatggtaaaaaaagagcagcaattgtaggtaaggaaaatgtatatgatttctcaataggaaacccgagcataccggctccgcagatagtaaacgacacaataaaggagcttgtgacagattatgattctgttgcgctgcacggatacacgtcagcacagggagacgtggaaacgagagcggcgatagctgagtttttgaacaacacacacggcacacattttaatgcagacaacctttacatgacaatgggagcagctgcatcgctgtcaatctgctttcgtgcgttgacaagtgacgcatatgatgagtttattaccatagcgccatatttcccggagtacaaggtatttgtgaatgcagcaggagcaaggcttgtagaggtgcctgcagatacagagcattttcagatagattttgaggctcttgaggagagaatcagtgagcacaccagaggtgtcataatcaattcaccaaacaacccatccggtacagtctattctgaggagaccatcaaaaagctctcagacctccttgagaaaaagtctaaggaaataggaagaccgatattcatcatcgcagatgaaccgtacagggagatagtctacgacggaatcaaggtaccgtttgtgaccaaatattacgacaacacgctggtatgctactcatacagcaagtcactttcgctgccgggagagagaataggatacgtcctcgtgcctgatgaggtgtacgataaggcagagctgtatgcagcagtctgtggtgcgggaagagcactcggttacgtgtgcgcaccaagcctgttccagaagatgatagtaaaatgccagggggcaaccggtgatatcaatgcctacaaagaaaacagagaccttctgtacgatggactcacaaggataggttatcactgcttcaagccggatggagccttttatatgtttgtaaaggcactcgaggatgacagtaatgcattctgcgagaaggcaaaggaggaggatgtgctcatagtagcagcagacggcttcggctgtccgggctgggtgagaatatcatactgtgtggacagggaaatgataaaacgctccatgcctgcgtttgaaaagatatacaacaagtataataaataatagttacaataaaaaaataatccgaaaaagcgccgaaaattgcctaaaaaatatgcaattttcggcgtttttaatatgcagttttcacaaagttgtctccgcgtgaccgctgtgtgaccgttgtgtgaccattgttttgtataatggaataaagagtgggaatataaataaaatcataacggaatagttataaaaaatacaatagaaaaggagatatgagagtgtttaataaaaaacttaacagggtactagcaatcatgctagcttctgtaatgggtgcgacatcgcttccggcaacaccggtaagtgctgatacaccatcttcagagtatgatatatctaacgacgcagcctcggatgatatatctgacagtaaaattccagatgaacaggattcggataataatgccaccgaggaaaaacagccacagcagctgacggtagagtatacaccggcggatgatatttatgtggggaacaaagttgttccggtggtaaaatccgacagggcggatgcagccgttgacaatttaaaatacactgttgtagaaggcaaaaatctgattgaaaaggatacagactttgcatcaaacggtatatggacagcaaaggataccggaactgtaaggataaaggtgacaaaagcagaagatgacaaatataagtcagcagaggcagaatatactgttaccatcaaagaatatgattacagcagtatgaataacagcctgacagggacaatgctgcacggtacacagttttatgtagaagcacctacattatcgctggcaagtgacaatcaggcggtatatgtggttagaaaaggtgatgaatggattgaagctgataaatatcagcttatgccacagcagggtgataacagacagactcttgtaatagcacgtaaggacaaggaaagcggagctatcacagatattggaagtctgcagctcgactacaaatatgatacacagcctccaaagataacattgaatccaaaggaggatgataaacctgctttcacaaaggatgctgtggattattatggaaatgtcagaaaagtagacatgaatatccacgatgtctctttggatgatggttccacacagctttgggtaaaggttgatgaccgggaagaattcgatgtatttgatgtcgataatgcccagaagctgattgatgcaggaatagagtatagtgactggatcgtgacaggggctgattatagcagctgcatcacatttggtacaaaagcggatgaggaacacaaatatcagataatcagaatgtatgcgaaggatcaggcggagcatgagtgtaatgatacaagctcaatagagcagccgttttatgtggatagaaaagcgccttcaggtactattggatatgatgctgatttaatagacgagcagaatatggccagtcagcaggcagcaaaggtatatggacagctggaggatatcagcggaataaagcaggcattctactatgtgaataaatcagatgaaagtggcagtattttaaatgatgagcaggtaaaagcgcttgatgattcagcatggaagccgttagagcttatcgaggatacatatgatgcccgatataagtacaagattaatacatctgatctgaaggatacttcatataacgtatacgtaaaggctcaggacaattgtaatggcgaggcagcatttttctccacagcgaagctggttgttgataccctgccaccggagcttacagtgtcacaggataccatgacagcagccaatgaaaaaggctggcataaggatgatataagctatatcgttaaagctgatgacagcttatcaggaattaagagtgttgaatacactgtatttgatgggaaaaggaaaattgtatcaggacagactgttgagcttgacgcaagcggggaaggaaggataaccattccggcagcagagcagtttaacggaattgatctgatgctttcagtaaaggcaactgattatgccggtcttaagacagaggttaaaggtgacagcttcaagttcagcatggacagtcagtcacctgatgtcagtatagagccggaagcgggcaaaaacagaaaatatttcaatgacgatgtccgtataaaaacaagtgtagctgacagcatttcaggtgttgtatcagcaaaataccagatagtgacagatgatcagtcagtatcggatgatgaaggtgcatggaatgagcttgatgaatcaggaatcataaatgtatcggctgaggcttatctggataaaaaggcagatgtatatgttaaagctgttgatgaggcaggaaacgtgactgtagcggatttgacagcaagcggcagccagccattttatattcacaaggcagcgcctgcaataacagtgacatatggtacacctgagcagccggatccacagtgcatcagcagtgtaaaaggcactgagtattacagggaaaacaggattgcaaccatttcggtaaaagagaatgagcttttctttgaccccgatgaaacaaaaatcaatgtaaaggttgatggaaatgaacagacacagtcagatgcatggtctgaaaagtcatactgggtaaagacaggcgagggagcagaagctgtttacagtaagcagcttgtattcaatgcaggacacaagtatgagctgagtgtcagtgcaaaagatttgtgtggtaattcagataatggatttgagatagaaggagacaaatcagcagagtttgtaattgacgtacagtcgccgacaggaaatatcaggtttgacggactttcaacaggcatggataccgtgtgggatttattgctgccaaaagacaaatatgagatttcaagctttgctgccaagaaggtcaatattgccggacagcttggagatgagcatggcggcatcaagtcagcagagtatttcgtttcagcagaggatgcaataattgacgtagacagtattcaggaggctgactggaagacacttgacagcgttaatgaggatggcaccttcagtgaaccgatagaatgcgagaacaaaaactgcgtggtatatgtcagggttacagatttaagcggtaatgtttcatatatcagcacaaatggattgatagttgatacatgtgcaccggcaatatcagtcatcacacctgagacagcatcaggagtgtacagtgcagatgtgccggtaagtatagaggtatcagatgagaatgccacaggagttgcatcaggaataaagagcgtaaactatacggtaacaaatatgggacagccgacacaggatggaacattatatagctatgataagacagcagcgggcttaaaagatctggaaaatcatgtaacagagcaatttgacataagcgcggcttcaaacaacagtaatgaagtgcgtatagatgttaccgcaacagacaatgcaggaacggcatacacagtaacaaaatacataaaaatagatacaacagcaccaacagtgcaggtaagctatgacaataacagtgcagatacatcatttggagacacagcatacttcaaagcaccgcgaacagcaaccgtaaaagtaacagagcgtaactttgatgcatcaaaggtagcagcggaaataaaagccgcagcaggtaaggcacctgctctttcagactggagcacagaaggtggaagcggtaacggtgataatacagtacatgttgccacaatatattacggacatgatgacgattacacatttggaatcggagtaaaagacattgcgggaaatgccgcagcaggagtggattatgcaaattcgcttgcaccgacaaaatttacaattgatacgacagtacctgttatttcggtagcatatgataacaacagtgcatcaaacggaaactattataataacaagagaacagcaactgtgacaatcacagagcacaattttgatacaagcagaatagcactgagcatgactgcgcaggatgcaggaaaatcagtagcagcaccggcatttggaagctggtcagataatggtgatatacatacggcaacattaagctttgatgcggatgccacatatacatggtcacttgcatatacagacaaagccggcaataaggcaaaagaccttgcaaagcaggaattctgcatagatacgacaaagcctgttgtaacaatcaacggagtaaccccgggctcagtaaacaataattcaggaaatatgtcatttgtaatagagtgcacagatactaatcttgaatacttttcaccggtgcttacagttgaggtatatgaaaatagcagattcgtaagaaaaacgattaccggaaatgtgatatcaattacaaacggacaacgtgtagagtttagaaatctcaatgaggatggagtgtattcactgacatgccatgcacaggataaggccggaaattcttatgaaacagtcaatattatagatgcaggcggaaagcaggtgacagagactgcagggcagggagaaaaattgatggatttctccataaacaaaggcggttcaatcttctcgctggatgacaatacgatgaagcttgtaaaggattactatgtgcagaaggtataccatgatgtggtagtcagagagataaatccggatgaagttaccagctgtactgtcaaagtaaatggaaaagcacttaagcagggaacagacttcagtgtgaataatgtaagtgaaagcgatggctggcataagtacgaatatgtgatatcaaatgcggtatttgaaaaagagggtcagtacaatatcgttgtggagacaaaggacaaagcagattcagttgcctatagtgatgtgaagagtgtaaatattgaatttattgtggacaagacagcacctacatatacattgacaggtgtagataaaaacaatgaaaactatattggctcaaagaatgcagtattgatgccgaaggatgatggtggaaagcttggacgtgtaaagattactgtagtgggcaaggatgacaaagaaaaaaaggttatcaaggaaatgtcgggagacgatatgcttgactatctggacaagcatgacggaaagatagagtttgaagtacctaaggaggtgctctctgcaaaagacggtgattcaaggcttatggtagagtgtgcagactgttctgttgacgaaggtggaaagaccaataaagtgaaaaaaatatatggtaaggatacagaagcagatacagagattgccgaagatgatgtacctatggaatcaaattcgtcagatgtcaaatcagtagaaacaaataatgataaggcagtatatataattggagcaatattattatttgtacttataattgcgatattgataatcgtttattatatgagaaaaaagatgaaagaaaagaaagacaatgatgagcaataagataattacctatgtatttacatcactatgtggtggtgtgggaaaaacaacaatgtctgtggcatgcgcgaaagcgcatgcccttcaaggcagactgggcaacgaagattttgaattctgggaggagggtgtatgagatttgaaatagcagctgacacggacagaggaatcgtaaaagaaactaatcaggatagtctgctggtaaagtgcttctcaacatgcaaaggagacatggcatttgcagtattatgtgacggcatgggcggcttatcgaagggtgagctggccagtgccactgtagtcagagcatttgacagatggagtgacgagcagctgcctgagctttgcaaatcgtcgaacccggatattgacagtctgattctggaaagacagtgggatgaagtaatacagcagcagaacaaaaaaataaaagcatatggcaaagcacatgcagtaaacatgggaacaacagtggtagcgctgcttgtcacgcaaaaagcctactacattataaacgtgggcgattccagaatatatagcctttcagaccatatagaaaggcttacgacagaccagacatatgtacagcgggaaattatgaatggaaatatgacacaggagcaggctatgaaagacccgcgaaggaatgtactgctgcagtgtgtcggggcatcagcagaggtaaagccggagtacaggaccggggcaatgaaaaatggaatgtcacttctgctttgttcagatggcttcaggcatgaggtatcagaacaggaaatctatgagatgctgaaaccggcagcagctgtagacgggcagaatatgcacgacagactggagcagctcatcagactcagcatgcaaagaggagagcgcgataatataacagcagcgctcataaaggcaaaggcacagtaggaggaacagatgcttgaaataggctctttaattgacggaaaatacaagatactaaacgaagttggacacggcggaatgagcgttgtgtacctggctatgaatgaaagggcaaacaaacagtgggcaataaaagaggtcagaaaggatggagtaaaggattttgaggtggtaaagcaaagtcttgttgcggagaccaatatgctcaaaaaactgagccatcccagtcttcctgatattgtcgatgtcatagatgaggatgacagattccttatcgtaatggattatatagagggaaattctctcaagacagcattgcaggagtacggagcccagtcgcagaaaaatgtgataaagtgggccaaacagctatgcgatgttcttggatatctgcactcacagaacccgccaatcatatatcgtgatatgaagccggcaaacataatgctaaagcctgatgggaatgtggtacttatagattttggaacagcaagggaatataaggaaaataacatagaggatacaacatgtcttggcacgatgggatatgctgcaccggaacagtttggtggaatggggcagacagacgcgagaacagatatatattgtctgggagccacaatgtatcatcttgttacgggaatgaatccctgtgagccaccttacgaaataaggccgatcagagaaattgacccaacattgtcaggtggtcttgaacgtattattacaaagtgtacacagccggatccaaacaacagatatcagagcgcagctgagctgatgtatgaccttgagcactatacagagattgatgacatgtataggaagaatctaaagagaaagcttgcggtatttatcaccacatcagttttgacgatgctgcttggaacaagcacagtattaagctattgtgcggcagaacacaaaaaaaatgaaaactataatagcatattaaaagaagcggatacctatgacaattatgacaatggatattacacggctatagtcaccgacccgacaaggacggaggcatatcttaagctgaatgacaaactgacagacgattttgtgctggacagggatgaggcgcagatattgaacaggctgatggtaggtatagattgcaaggaccacaatggccgggtgcatacatatgatgtcatggcaaagctgaaagaaaaaaatccaaagggatatgaggatgtatgctataagattggtgaaagctttttattctactacgaaatcaatgtggaaaaagacagatactccagtgcggcgcagtggttcaaggaagcgaaggagaatcatccggaggcaggaatatactgtgagatatcagattgtctgacattgattagccagtatgatggagcaaagatacaacagacagaaaaaacatatgaagaatacaaaaagctatggaagcaaataaatgagctatatgcaaaatcagaggattttgacagcttagacgcaaagattcaggtatggaatgagatagatgatatagttgacacaaatatcacatcatttatagcagtgacagataaggataaagttatggatttattacagacaataaaggacaaaacagaaaagctggataaatccataatgcgcgagcaaataacaggattgcaggataatatagacaaaacaattgagaaggcacagagcgtgaaggaggaaaacaaagatgacttataatcagtacaggatgatattttacgtatccttcaccgcatttgccataatgcttatagcttcaatagtcatacttatagtgcttgaaatacctaaggtcataggtgcacttaccggaaaatctgcccggaaaggaattgcagcaattgtacaaaagcagacagcgggacatattgacataacatcgtccggtccgatagcaccgtcatataacctggcaggggagaataagaaaaagccgggatatacacaaaatatagatgaaactactgtgctggatgcaccgacagaagtattgcaggatgaaatcacagtattggaagatataaccgaaaagctgcaaaaaaccaatatcaggttcgaagtaacaaagaaaatagaatttttacatacgacagaatgtatctcataaggaatggaaaatagcgaatgtctaaattaaaagtaagcataaaaaaatcgaccgttactgccatgatgaaggcaggacgaaaggaaagaataaatgaaaccgaactaagccagctagccagaataaaaccatgtggaatcatgcatgtgacaaaaacaaaaaaagacagtgtcatatatacgtgccctgcaaatataaatcttaccgatagattgaaaaaagccataagcaaatatgatttctttttcatgattgagcagatagtaataatggttgaggatgtatacaataacggactgaacgtaaacagtgttcgttttaatatggatgacgtatacataaacgagatgacaaaagagatgtactttatatattttccgatagtaggaggacaggaaagtgcagatattgtcgggtttatagaaaacataatttatacaatgacacctgttatcaatgaggatacgaattatatatccagatttatgtattatgtcagaagcttccatggcttcaacggcaatgcaatagaaaaatatatctcacgcgaagagcgtgcagttgtgaacgtgctgaaaaacaaagcagtgacaatgcagcagacaatgcagcaacagataatgcagcaacagacaatgcagcaacagacaatgcagcaacagataatgcagcaggtaatgcagggcagcatggatggaactacagtgttgtcagatgatggcatatccgtacaacagatacagcagatgcaaccggtgaactatcattttgcaagtcttacaaggcaggtaacaggtgaaaagatagagcttggcaaaccatcgtttgtgctgggaaagaatccggaaaagtcagattatgcggtagcagacaatacgaatatcagcagggtgcatgcagtgataaccatgcgaaacggacgttattatgtaatggaccaaaattctaccaatggcacatttatcaatggaaggataataaaggcggggcaggaaacagagatattaccgggagactgtctgatgttagctaatgaggaatttatatttaatgaatagctttaaatataaaaggtgaggagaataatactattatggaactaaaagaattaagtcgcagaatatcaaggtaccgggcaaatgtagaaaatctgcagcttgagaaaaacaggctgcttaatgaaatagatgctttggatcaggaagcattgaaaataaaggaatataaatggcaggcgcaaaaccggtttaaatgcagagttgataatatagccggcatggacagatatagcagtcgtaatataacaaatctgaagggcagacttaagagtattaattcattaaacgacggaaaatcgtatgtagccaatgcgatgaatgctatagattcaatgctgagagatgtagagaatgcaatcaggagcagaaatgacaggatatatgaaataaatcagcagctgtgtacatatgaggacaatatagagcagctgagaatgaaaaaaagaagaatggagagtaagtaatgggacagtacaatttaatgtttgagcaggaggaatttacagaacttgtgcgtttatactcagaacttgcaaagattgcagatagacagatgaacgaatatcagatgatacttgatattataaacacaaatgcggttataagcggtgaattgcacgataagctggaagtgtacgaggatgctgttcatacatatcagagtatactgggagaatccttcagggaaatgtcaaaaaaacttaatgaatttgtgagagatgtagatgaggcagatggagatatatatggtataggaacatatgaagcgtattagaaggaggggtgacgcataatgaaatttaaggattttacgcaggaagcatacgatgacatacaaagctatatgggaggagaagaacagtgggaggaaataaacaaaacctacggtgtagtggaaaccaaaggtatatttcaatatgattatgaatcacagctaagaaacgcggcaacagaatatcagagacaaaatgaagaggcaagcaatagtgtaagaaggatgtttgataatgtaaatggagtggatgatctatatgcagccaggtttcgggacgaatatatggacttggaaagattcagcactgcaattaaagaactggcagctcttattaatgtaagatccgttgagaatatatatacgatggattgccagacattgaaaacaaaagctggtaatatacaggcaaaagtggactcgaagataacagagtattataaagagcgattctattcagtggattctaatggaaagacagttatgaactgggacgaaataaactatgagatgcggaaggaatttgtaccagatgcagagctgcaggcacttgtatcagtatttccaaagctgtccacagatgatgaggaagaaaccatagcaaatatagagaacatgctgcgcgcaggttatggaaacgccaaggatgatgagtggatagataatgcagatctggaagaccctaagtattacagtgtgagtgtcacgaatacatttaagagggcggtggatatatataagacaagtatggatataattgactattacagcgaaaaatgtgcatacagaaacgacgagattagtgatgaagcgcttgaagagatgaaagagcagtacagagtgtcatccctgtttaaagcaatggttgatagctacccgacaataggagttgcatataatggaaaaaacgatggatttacaatacattccgataaagagaaaaatgtgaccgtatccgtatgcctgaaagagctgccgtttgatgtaagcatatgcaatattacagacagcaatgacagggagatattggacaaatattataacgtcaaggtaacaaatggaactattaatgaaaaagtaggaaaagaaaatgagaaggtcaatcagatagatgcgtatggaatggtagataatcagattgtaagccatgtacttccacacggcatgattgagaatacaaagcagaatcttgaaaatcaaaaggaagaggaaaagactgaatgcagagtattttttgatgtaacaagtaatactttaaaaggtaagattattgatgaagctataggcctttcagcggtaataataaatgaaaccgtaggagataagattaacaaggctaacgcagcaataaattatttgaatgacttaaatgcagcatatgatgaaaataatgaaaatgtacaaaataatgcagaaattgatgaagcaaaagacagactgacagaaacagactttacatgtcaggacatgatagaagatgccaattatttcggcatggatatggagataaccagggtaggtgacacctatatctgtgataatatcacgatggatgtggagaaagtgacgaagatggtggatgcatataatgcacaggcagagccgaaacagcaggtaagtattgatgacttggaggactatgccaggggagcaggtgataaaaatcagagagaggatgacgaagactataaggctttgtgcaacagagtgtcaaactatattgattacgttatagaaaattgagataacaataaataggcatgaatgcaacgcatacagaaaggaaaatttattatgaagaaagcaatatcagttcttatgatagcagcatgtatgttatgtatggtgacagcatgtgaaaaaaaggataagaaggaaaatgacacatcagcagcacaggcaacagaaacagattgcacggcagcagagcgtgtgaccacagagccggaaggtgaaatcacgatatcagagatgatagatcagaggattaaagaggaagggaagataatgatatataggatgcattttggtccgtcaaagactcctttggaaataacagaggatttaaacgtaaatattatatcgtatgatgggaaagaacttatcgattatggaaatagctctaatcgcagaggggagaccagacttggtgacataatacataataaagtggattattcaacatataatataggcgcatatggtggaaactggaagcgacatcgttatgtgtctggtggagacgaaaagtatgtggaagaagaaggctatgtacagcgcgaaatcactacagatgattcgggaaataatacccagatggagacactgtattcgtattcaaagggaactctttatacaagagaggagggaagtgaggtatggaatcagacagagaaagaggacagtctagatatagtatcatttggaacatttgagaggataaagctggatggaaaaacatacatgacattctgcgtaagagataatttgaatctgataaagtattatataattccggacaataaattcacagagaacaagacagttgtatatgacactccgggatcagagggaaccacagtcaatacagtggattacctcaaaaaataccaggcggttcccaaagaagagctggagcagatgataattttcccaggcagcgaaaaagcggaaagctcacaggctgcagattaaatacggtatgattgcttatgcaattatatataaaaattattttaaggaggacatgaaaatggcagcaggacagatcagaatgacacctgacacaatgagagaaagggcaggagagtacaggacagaagcagataatgtacagagcgtaatcga

SEQ ID NO: 1528 - DNA, 1079 bp, Unknown
  gut microbiota DNA sequence
ttctccttattcatccaccatttttcaagttttcccgtgcagtatgcattattttgattcaatcatacttctattttctttttttcttgaactacttctattttatccttggcaatttctttctcatacaagtacttatctgttctattcaatccaagtatatcagcaatttttctatcacctgtgcctacaaaaaaagtatctttcaactctttcctaatactaaccttataaccattaatcaaaccataagttctacactcatatgcttcttgaatttcatttggcgaaattattttactatatactccgctattatattcatcaacaaacgttgcatctattatttcgcgatttgttgtaattattattaagtttccatcattatcctcatttaattcgtactcatttccattatatacacaaaattcaccattttttatcattttctattttcctttcacttctacaaaatgtttaccatcaaatattgcaacaacagtatcttttccattaacaactttatgtaattccgcacctttcttaggttttacatattcaccacttaaagaccactcgggtataatttgcccattccttgcacctgtaaatccatttaatgtacaaggaggaccatctgtatttgttccaccgaatatttccccatatggtgtctttattttttctgcatctgttgtcttgaatttaatatatgcataagtatctccaccttccggatacggtcttactccatcacctgttacataatccagtcgcgatgactccacaacattatcatatccttttatgtgtgatatatcatcatatcttgccacataaccgccaattgtagaccagccatcttctcctatatacttgtctatatccgaagccggtattgtcttttgaatataagtgttagcatctatctttggaactgcctcgcgtattgccttcatctgtgcgatttgctcctttgttaaatcctttatatccgtcaatcttaacttattaaattcttctaatgttaatccctgttgttttaacacttctcccaaatttttatttgcaaagctaga

SEQ ID NO: 1529 - DNA, 1105 bp, Unknown
  gut microbiota DNA sequence
aacatcacttttgtactctctgttaccactcatataaaatcctccttcatttgaaaacactaaagcaggaaatatctgtgtggtaaaagccctcttatcctgctttaaataaaataatgaaatatttaaaagcaagaatttcagggaatatgaaaaataattaaggtattgaagaccctgcacgcccttatcgccggacgacatcttattatgcctcacatatttacagagcatatagtcatatctgtaattaatgtgccaacgaccgcacaggttgctatagaaaaactgctttgactatattctaacatatatggataaaaaaacaacaaaaaaatacgcaacagaaaagcctgttacgtattttgacttttttattaaaaacataataatctgatgaaaacagttactataagtattaatgctattgctttttctgcaatatatgaccttgcatccggtacataagttttctcccagattgagtatgcacatccacaccccactacaaacatgcaatatagcttaaccgactgtgaattcatataatcggtgaaaaacattataataatccatactgttaaaaacaacattaaaactaagtactttaaaaataattgaattttcttcatggcaaatcccccttaaatatataactgcatcattatgtttccataaatagtttccttcacttatatagacgcaatccatgcttatatactaacaaaaaccaagaattttttcaatccctactttgtcaccactgcaataacataatcctctagctcacgaaacactacccttttttcataagcctccatcgtcctatcatccagctcccccgaaaagcctgtaccgacaagcttcattatagcctcatactgtgtccagtattttgcaagctcaatttgaaatgcctcagattcattctcaaagccttcgagtttgtcaagctgctcttttcgcattatacgctttgccaccttgaagctcatgcgttttgtctgctctatgtccacgccaacgggcctgtccgatattgcaagcaccacatacgggccgctgtgtgccagattaaaaaaagtcccgccatcagctatttccg

SEQ ID NO: 1530 - DNA, 4135 bp, Unknown
  gut microbiota DNA sequence
tagcctgttgctgcctgtttttacacctttttctgaaatagttgtgtatttatccacataataggcagacacatgtggaattatctccttctgccggcctgcgatggaatccgttttttctataaaaatctgacagttattgtttattttccataccatcccaagtcacctttctataactccaaccttcccctgccttcatcaaaatacaactaatattataaattatccctacgatatctgcagctcatacagcttcctgtatatgccatcctgttccagaagctccctgtgcgtaccgcgctcacatatgcgtcccttgtgcatgaccatgatgcagtcggcatgctggatagtggacagacggtgcgcaaccatgattgttgttctgccatccatgagcttttcaagcgcctcctgtatgagaatttctgtctctgtatctatgttggcggttgcctcgtccatgaccagtatgctcggattgtgggcgagcgtccttgcaaaggacaatagctgacgctctcctgccgagaaggtcgcaccacgctccgtgaccggctcgtgatagccctgtgggagcttttcgataaagtgtgaggcatttacatattctgctgccgccttcacctgcgcatccgtgatagcgtcatcattcaggcggatattgtacgccacatccccctcgaatataaacacatcctgctgcatctgaccgattgcactgcgaagctgctttttgctaagctgtctgatatcgatgccatcaatgtagatatgtcccttttgtatatcataatacctgcctataagatttaaaatggatgattttcctgctccggttgcgccgacaaaggccaccttctcgcccggattaatgacaaatgagacatccttaagcacatagttttcgccgtcataggcaaaccagacatggtcaaattcaatttttccggtgattttatccggctgctttggattttcgacctcaggaataaattcatcctcatccataaccgtaaatatcttctctgctgatgcaattgatgactgcagtgtcgaaaactgctctgcaagttcctgtatcgggtcgaaaaatgacctgatgtaattcgagaaaatatacagagtaccgaccgaaataatctcatcaaacacatttctgcttccgaaccacagcactatcatcagcgacaaaatgctcagaatatagataagcggacggaacaccgcatacataagcatctccctgtaaaaagccttgtagagctttgtatttttatcatgaaattcctcgaacttgcgctcctgtctgccaaatatctgtataattttcattcccgaaagatgctcggacaaaaatgtattgatgtccgtcaggcgcgtacggtaaagcctgtaaatatttctggcaattttctggcacagcaccgtaagcccaattacaagcggcatcagcacaaatgatatcgcagcaagcctaacatcaagcacaagcataacgcctgcaagtcccactatttttacaatatttctgaaaagctgtacgagaatgcccgaatacatctcattgagagcctcaacatcatttgtcacacgggttacaagctttccaaccggcgtgatatcaaaatacctgcttccaagagactggatatgtctgtataggtcttttctcatctgaagaatgatattctggcctgttttctgcagtatccaggtctgagcgatgttgaatgcaaagcttaaggcaagtacaaccgcatatttgatagctgtagcaattattacatcataatccccatttgctccaaaagtatcaattgcatctcccaccagcatcggcctgtaaaggtcaaaggcagtcagtcccagcaccagcagaagggcaaaaatcccccagtgggcatacggcttcatgtaggctatgaggcgcattgtggagctttttttattcatttcttttttacttatatttatactcgaattcatactataatcttctctgttatttcgtaactattcatcgtcaaatctgcatagcaactcttttcaagcactttaactgccaagctcactctcaagttgctgcttatggctgatatcagcgtaaaaaccgccaagctcaagcagctcttcaggagtgccatactctgtcagttttccgtcagaaagcactgccacatggtcagccttctgcagtgtggaaatcctgtgggcaatcactatggttgtcttgccctgtctggtttccatgaggttttcaagtatctgctcctctgtatcggtatcgacagcagaaagcgaatcatccagtatgaggattgcagaatcctttaaaagtgctctggctatcgagcttcgctgcttctggcctcctgaaagtgtcactccgcgctctccaaccatggtcttgtactcatccggaaagcccatgatattatcgtgtatacacgcgtcctttgcagcctgttttaccgcatcaagaattgccgggttgtcggcaatcctgtcctccagaccaaatgctatattctcctcgagtgtgtcggaaaacaggaaattctcctgtggcacatatgagatatcacggtgtaaaaccgccagcggatagtctgttatcgggcgtccatccaaaagtatcatgccgttttcacaatcatagactctaagcaaaaggtcggcaagtgatgattttccgcttccggtacgtcctaagataccaagcatctcgccctgcttcacatgtatactcacgtctgaaagcaccggcttggagccgtcagggtatgtgaagctgaggtggctaagctgtatatcaccatgtatttgtattttatcataaataccctcagctaaattatctgtattgctgcctgccatgccatcattttctattacattttccggtggcaccatatcgacaatatcaggtttttcctcgaaaatagtccggattctgccccatgccgcagccgcctgggaaaatgtgttgatacagtcgcctgccgcaatcataggccacacaagcatatcgatgtatgagttgaatgccacgaactggcctatcgaaacctgtccgtcaagcaccatcctgccacctgcaagtagtgtcactatcacgcttattccgattacggcatccaacgccggaccaaagacagcgcgaagctttaccacggcaagatttttctccctgctgttctcgcaagccttttcaaactgcttaaagtcctcttcctcctgcgcaaatgccttgaccacgcggataccggcaatgctctcctgcaccttgtcagacagataggagaaagcatcctgccttttcacctgacgtttctttgactctattccataaaaatagcagccgattgcaataaaaataagtggaataaaagcaaataatgtcagcttaaaatccacgtatactaccattttgacaagcaccatcaccgtcatgattaccgcgtcaaacacggtgatgacagccattccggttcccatcctgacagcctgtaaatcgttagtgaaatatgccataaggtctcctgtcttgtggctgttgtaatagcgcgctgagagtgtctccatatgtgaaaacatatcatcgcgcagtctgtattctattcctcttgatgctcctatgatgaaatatctccatccaaagcgccccgccatgattatcaggcctgttatcagtatcttaaatataatgccgcccacgcccgccatatcaagctttcctgcagtgattccgtcgattatctccccaataaactgcggaatgtacagatttgcaaggtctactgcaagaagcacaaaaatgcctatcgcatagtgccatttgtatgcaagcagatatgggcgcagcgagtattttttatcgttcatgttattcctccgtattttaaatgccattgtatggcaagcatgcgaccgcatggttagccaggcatgcggccatatgctctctaagagctaacgctacgctgttaagaggctgtacgaattatgctcatagtttttctatgctcgacgaaaccggcttttatgtgccgtccatggcacataacgccttgccccggcgtccatgccggtgcatttcaagtacagcgtgccaaaattaactggttca

SEQ ID NO: 1531 - DNA, 552 bp, Unknown
  gut microbiota DNA sequence
tacatagcagatgaggacaagctggataaagtgcttgaaaatccgcaggtgattaagacaccggtggttagaaacggcaggcagtcaacaatcgggtaccagccggatgtatggaagacatggaaataacactaaaggaaaagaaaggcaggaaattatatatgtattatgtaccggatggcacagagcagtgcggttattatgagtgtaaagagtgtggaagcaggtttctggatttaaaaattgcaccaacattggtatgtccatactgtggagaagaagcagatatggagataggacctgatgaggagatgccaaaagttgtagaatctgcgaagcttattcagatggttagaggcgttgaagaggtagagaagatggataagctgttatcgcttgcggtgacaggtggcgattttaactggatataagaatgcagatatttgtagacgcagatgtaaagtagctgccggcggatgtgacattgattgagaagattggagaggcactatatgaaaccaaggacagcaagtgctacatcatacggtgttc

SEQ ID NO: 1532 - DNA, 28820 bp, Unknown
  gut microbiota DNA sequence
ttgaaacataatctcttagaggagcttatcaaattcaagtttgtagaaatatctttctaattttccctattttacaggctttccagtccgttcattagtgaaatgatatgtattttcccttatttttgcccttatgagataatcgtaaggcaaatatcttataacgataacgaaaggactataattcatgagtagaatacttttggtagaagatgatacaatgattgcttctgggattctgtatgcacttgagacagaagggtatgaaacaaatcatgccacaggtataaaagatgccagaagtttaattgaacattataattttgacctggcaattatagatatgcagcttccggatggaactggatttgatgtaagtgagatattcaaaaataatgcgacatctgtgattttcctgacagttgtggatgatgaaaatacaattgtgagggcatttgatgaaggagcacaggattatattgtaaaacctttcagaatcagggaacttttggcgagagttcggcgcattttatctgccaatatcaaaaatggagagaaggacaacataatctatatgggtcatgcagccatccatacagatgaggcaaaagtttatgtgaatgataaaagcatagaacttacagcattggaatatcggttgctgcttatttttgcgagtaataaaggaatccttttgacaaggcagcagattcttgacaaaatatgggacgcagacggcaactttgttgaggataatacacttaccgtttatgtgaaacggctgagggagaaacttggagaggcaatacatattgagactgtgagaggaatgggatatcgtgtggattaagaaaaaagagatagaacagttgtcggagtttgtgaaaggctatagttccggcgagaaactggatattcgagagaataaggaaggctcttttaacatattaaaaaatgatatttatgctcttgtgaacaccaaaaatgaacagataaaggcagttgaggcagaaagagacagtctctctgattatatggcagatatttcccatcagttaaaaacaccgattacttccatgatgattatggcagatttattggaggaggcagagccggaaaaacagacagagttcattcataacattcaggtttcgctaaacaaaatggagtggcttgtaggggcacttcttaagatggcaaagcttgatgcccatgcaattgattttatcaaaaatggcattcgcacgtcagaacttttagaggcggtaaaaccatcagtggaaatccttttggatatccacagtctgaccatagaattgaaacaggattgcatcatacattgtgataaacgctggaccacagaagcacttacgaacattatcaaaaatgcgatcgaatattcacctgatggaagtatgattgagattgacagcggagaaaatcccatgtatagctggatttcggtcagggacagcggtatgggaatggacaaaacagagtatgctgctctttttaaacggtttgaaaattctaccaatgagaatggattcggaatcggaatgccgcttgcactctctattctgaaaggacagggtggcgacattgatgttgattttggaggcaggggagagggaacgacttttattttaaaattttttaagtgaattgtttctaagtgacaaaattgtcacaataataatttcttttgtcacagaacagtcattttgcattgctaggatggtatttgaaaaaggaggactacaatggctgttttagaagtaaaggaattaacaaagaaatatggtgaaggcgaatcggaagtgattgcgcttgatcatgtgtctttttcggtagaaagaggagaatttgttgcaatcatcggagcatccggttccgggaaatcgacacttatgaatatgattggcggaattgattatccaacaagcggttctattatcattgatggaaatgagatacaagcaatgagtgaggatgaacttgcaattttccgcagaagaaatctgggaattgtttatcagttttataatctgatacccactcttactgcggaggaaaatattgcgctgccatggaaattagatggaagaaaagagaataaggaacggctttctgagattgtgaatatgctgggtcttgagaaaagggcaaaacatctgccgggacaaatgtcaggaggtcagcagcaaagagtatccataggaagggcgcttataaacgagccggcatttattcttgcagatgagccgacgggaaatcttgatagtaaaacaagcagagagattctggatattttgaagttcaccaatcagaaatataagcagactattcttcttgtcacacatgacgaaaagatagcgctgcaggcgaaccgaatcatcacgatcggagatggaaaaatcataaaagacgaggtgatgaagtaatgaaaataacagcacaactcgccttaagccagatgaaagtgaataaaaaaagaacgattgcaggaatttttgcgatcgcacttgcaacatcacttattacaactgtaatgtgctttgtgacaagcgcaaataagatgcttacggatttccttggctcggattatggagaatatggaggagcatactctctcatgcttgcaataccggcactgcttttaggtcttcttattgcagcaatgtcgattactgtaatatccaatatattttctgccagtgccaataagcggattcaggagtttggtattttaaaatgtgttggtgctacaggcagacagataagggcaagtgttatctatgagagtttatggcttagtctgacagccattccgcttggactcattgcaggaactatacttggttatattagtgtgaaatttacaggacattttatttccgatatcaatgatgctgcaaaagaaattattatgagaccttttaccttttccctgccctttcatatatctgtgtggacatatttgtttgcaggtgtattttcgttttgcattgtattattctctgcatacagaccagctaaaaaggttggtaaatttactgctatccagtgtgtaaaagtgattggagcaggcacagttttgaaagagatccaggtaaaagacagctttatccaaaaaatatttggatgtgagtctgcaattgcctataaaaacatgaaaagaaacaaatacggctataaggcaacgatacgtgcattgtcacttggaattttactttttctgttaaccggaggattatccggtcaggcaaaggaattccaagaatggatgacaccaaaatcaaaagaaatgatggtggattattcttccaattacgatatcgaggtaaatgcgaaaacagggaaagaagagagaaaaatcagccggcctgttacatcagaccaatataatgaaattacacaaaagctggaaaagtacgggatagacgtatatggtgttggagcagatacttttacctacaatgcgctattagataaaaatacattaacagaggatatgctgcaggttccgaaattttctgatgataatggggaaacaaggacagaaatcgtgtccgttgatgatgaactctataaaaaattgtgtgacagggcaggagcagaatatggaagtatccttttgctgaacacttaccaatataatgacaatggagagtatgtgtcgataaaaccttttaaagatgatgtgacacagatttccctgataaacgcagccaatgagaagaacacacttacaattggtggtattttagaacagtccgatttaaaggaatatggttttttggaaatgacaccatatccggtcagaattgtcgtacctgatgcggatgcgaggagttttgactggtttagtatgccatcagatgaagatgattatacagaatatgccagaagtgtcatggatgaatattatccgattgcggcagaggattcttatgtagagcagggatataccgtgagaattgcccgcacagatgctatggttaaaatgctcaatatagctatagttcttgctgaaattgtgatgtatggctttgtcatcctgctcattctcatgggatttacaagtgtaattagtacactgacgacaaatatcagaattagaagccgtgagtttgctgtgttaaagagtgttggaatgacaaataaatcactttgcaggatgttatatagtgaaagtgttttttgtgttgtaaatgcacttgttccgggagttatacttggaattgccattccatttttaattaatttatctattcggaaggctttctcggtattgtatcatattccgtgggcggcattatttggtggtatatttgttttgataggaattgtgttttttatcacacgagctgaaattcacaagttaagagataaaagtattattgatgaaataagaatggatattgtataaatgtcaatgctgttgtgttcccttatcagagttcgtaaatccatatgggaagatataacataagggaaagtctacgggaaggctcacctgtgataaacttagtgttttcaagggattgagagatatttgataataaaatataacaattattaaattccttggaatatatgaaatctcaattcaagtttgcagaactgaccaaaaatacaaacagttcgtaaaagcatatttttacgaactgtttttttttcgtatttacggcattctttttctcaataataaaataggcaatggcaattcttaccagtatttgatattgtaaagttaccacacaaaacaattcaatacagaaagacaccaccgcccatgaaaagactaccatttgaacgcttttctgacaagcggttttattatgctaatgcacctccatgtaagcagggtttttcattaactactgatatttcgccctgcttattcttgtagtagccaatcggctatattgtgaatttcgattccttcataactatattggggatgtttggttctggcaataataattttcggataagcatctcgaacctgaagcagaggagagtattctctcccaaatgtttcctgcccggaaatgttgtcgctgacctgaatataaatcttctcactgcctctctgggcaacaaagtcgattttcttttgatagagcttgccgacataaacatcgtatccacggcgaagaagctcgatgcaaacgatgttttcatatagtcatccgctttcaaaaacacaattattaactcgactttttgacaggcagtgtatcaacaatgatttttccgatatatcaatataaatatagttgagttattaaaaagatattatattagtcgaatttcgaatgatcaattctgtttcatattgacagaaaacatgagggcaattaggatgctgaattctttcaagaatttgtcttgcagcagcaatacctagatatttctgaggagtgcttatggttgtcaatgacggtgaaattctggaagcagcagggatgttatcaaatccaacaacacatatatctttgggaatctggaaaccaaggaactgcagtgcgtatatcaactggatagcagtccagtcatttccgcagatgaatacatctggcagtgatatcatagcttgcaaattattaactgtggtctgaaaattccgaaaatcctccggcgtttgatgaagaaggcaattcttctgattaagtggaagctgatgttcagcaagacactcggataaggcattataacgttcctggaatccacggcttacattaggggaatagaggtctccaacaaaaccaaagctttcagctcctttttctataagttgattaattattttttttagattctttttactttccattgtgactacatctattccatttagttcttcaaacggaacatttggcatatctacagatacaattggaagattaaattgtgagagagcatcgcatacaactttatcacagatctcaacaagaataattcctttgatagaagaatcggaaatagtttgtgggaaattgagttgttttagatcactgtcggacatgatactgattgccagatgataattcgcatttgaaagaatcgattcaattcctcgtaaaacggtggtccaaaattcggagtcggaagcgtaagttctggtaaggaaaagaatcgtcccattgctgtctgtttcggaggcaggtatgacaggggtggcgaaagtggcatttttataaccaagcttagaagcggtctttataaccagatttcttgtattttcagatacctcagaactgttttttaaggcttttgaaacagtatttctggaaagccccagatgatcagcaatattttgaatggtacatttcatagtaaactccttttatattgtatttatatgctttagatatagtataacacaaaatgcacgaattgcaaacaatacaacgtaaaaacaaaatgcacaaaatgcacggaaaaagaagagaataatataaataatgcacaaaaaatgtgaggctgaaatatagaaaagagggaaaaggagaaaatactgtgcaaaaacttgaaataatgcaaggaatatgataatgtaaatgcatgaaatgaaatgtgcaaatggtgcaaaaaggagggtaaaaatgaggcgattattttataaacaaaaggagggtaaaaatggggcgattattttataaaccagaaaatgcctgggttggtgatttgattccatattatgaaaacggaacctattatggattttatcttcatgatccaagaatacgtgataaagaatatgccgaagagactacatggcatctgattgagaccaaagattttgttaatctggattataaaggtgaatcaattgcaagaggtggtattcatgatgccaacaagaacgcatatacaggatcggttatcaaatgtgaaaaagatggattgtatcatgttttttataccgcttataatgaggattttaaacttcgcggtaaaacaattcaatctgtaatgcaggccacagggaaaaatctggaaaatttggagacagtaaaagattttttgtttgtctcagatggaaaacagtatgaagagtttgactggagagacccttttgttttttggaatgacgaagaccaatgctattatatgctgttggcgtcaagagtgacgaacagaggagatctcaggggtggatgcattgcattgtgtaagtccgaagatttaataaactggacttatgagaaacctttttatgatcctaaaatgtatattacgatggaatgtcctgaactgtttaaaatgggcgaatattggtatctggtattttcaacattttcagatcagtttacaacacattatcgtatttcgaaaaactggaatggcccatgggaaatacctgatgatgatgtttttgatacaagagctgattatgcaatcaagactgcttctgatggcaaaagacgatttgctttcggatggatagcgagcaaatatggaaatactgattttggtccatgggaatggggcggaacaatgaattttcatgaaataattcagaattcgaaaaacggagaacttagaattaaagctattccggaagtgctggattatttttcgaaagagattgaattgaaaaaagaaactttatataactgcaagatggtacaggcgcaggatggagtcagcgttgaaagtgatacgctgggggctcttttatatcctttagaaggtgatacttttgcgttggatatggtaataaagcctgagagataccatgaatttggaattgcgttacacgtggataaagaactcgaaacgggttatttcttacgtatgaaccctaaaaatcaattagttgcatgggatatgtggccaagaggagaacagggaagatatcagtggcagataaagggagatgttccttatcagatagaaactgcaagaaaactgccaaaagcggaagaatatcgagttcacatcataaaagaaaaagatatctgcgtagtgtatattaatgatgaaattgttctttcgaccaggatgtataatcataaagatggttatgcaggtatttatgtagtacaaggcaatgtaaaattaattcaatataaagaaaaaaggagcgagtaatatgaggaaaaagataattagtgctatgttggcattgtgtatggctggtagcttattaacaggatgtgggacgtctgctgatgcaggaaagaaaagtaaagacagcggggacgttactaccgtaaaatggtttacgtcaagaccggttgacggagcaattgatcaggtaatgcatgaaatcgcagatgaatacagtgagaagatgggtggaaaatggaagattgaatttgaaactacagctgatagaccatcatatttgcagaaactgaaaacattgattgcaggtggaaatatgccggatatcattgatattgacgcagatccgtattgccaggaactggttgatgcaggaatgcttgtagatgtaaaaaaattcctgaaggataatggtaaatatgatagtttttatccgactgctctgaaatatcaggaatttacagacggatccatgtatacacttccattggaatatcatgttgaaatgacttggtataataaggaaatttttgacaaatatggtttatcagtaccgaaaactatggatgagtggctggatgtatgtaaaacgttgaaggaaaatggagtaacaccaatttcagtagatggtgttgacagatggccggtacagagatatctggcaatgatgccgtttagagaatctggtaacgattatattatcaatcttcgtgatggaaaagaaaaaatggccggagatgaaggtaaagaggcagcaacattcatgaagaatattggacagtattttaatgatggatttgcagcaacggattatgcaactgcacagtcgatgttcctggatggaaaatccgcaatgtactacattggtgattgggagattgcagctatgcaggacgcttataaagctggaaaaatagattatttctatcttccaactatcgaaaacggaaaaacagatgcaagtgaattttgcgtaaactctggaatcggaatggcattcaatgcaaaaacatttgatgcaaaaaccaaagactttatactttacgtactggataactatggtgaaaaatatgcagcaaaacagcagatgtcaccaatcaaaacagaacttccgtcagatgtagaattctcagatctgtatcttagaattcgtgatgatatggataaaacaggtgcgcagttcctgaaaccatgggatacatatctggatgcagatactaatacaactatgcaggataatttattgcttcttgcatccggggatatgtcagttgatgatttctgcaaactgatagatgattctattgcaaccaacgcgaaaaactaaggatgtttgatgtctgggagaagactctcccagacatcctgtatttaaaaccatggaggacaatatgggcgtaattaagaacaaaaaatggttttttatatttttattacctggactgttattttatattttgtcagttttttatccaattgaagagtctattaggctaagctttatggaatggaacggaattggtgataaaacttttgcaggtctgcaaaattatgttacaatgtttcatgatccaacattttataaatcatttttaaacaatctgatttatcttcttattgtggtagttatgcagcttggaatcggacttgtttttgctgtattactgacttttatgaaaaaacatgtgacatttgttaagactttatactatgttccttgtattatcacaactgtagctatcgcacagctgttcagaagtatgtatgcaacagaacctatggggctgataaatcagttttttcaggctataggaatggaaggaatggttacttcctggctggcaaatattcacactgcacttatggcagtgtcagtgccagaaggctggagatttacaggaatgtatatggttattttttatgcagcgttaatttcgcttgatccatctgtatacgaagcagcaaaagtcgatggtgcaacagatttccaaattctgttaaaaataaaacttccattgattaaggatattattcttctgactcttactatgtgtttgacaggtgcgctgagaggatttgatattccatttcttcttacaagtggaggaccgggaaatgcaagcgagctgctctctacatacatgtataagaaagcattttccaataaccaatatggttatggtagtgctctggcagtgtttatcattattgaaagtatgttggtggtatttatacttcgtaaaatattttcagagcggaaggagtgtaaagaatcatgaaaaagaaaattggaaaaattgtatttgcgatagttattcttgcctttctgcttattcaggtttatcctataatatggctttttatggcaagtgttaagccgacgatagaattgtctacaacgccgtttgctttgccgaaagtggtgacatttgaaaactttataaaggtattttcagatggaaaaataggcatttatatgtggaatagtttaaaagtaacgggaatctcactgattctgattatttttctcagttcgacagtaggctatgcattgtcaaaattcagaatacgtggaaaaaaacaaatttataaattttttacgttcggaatcatggtgccagtacagattacattgattccactgtttattttctatagtaaaatgggaatcttgaatacaagtttttcactgattttaccacaggttggatttgctcttcctctggctgtgatgatgtttgtaagtttctatgattttgttccggatgagctggttgaggcggctattgtagatggatgtaatccaggtgttacatttataaaaattgtgtttccattggcacgaaatacaataattacaattgcatccatgtatagtattcttatatggaatgattttatttttgcaaatacatttatcagtgacagtaatgcaaaaacagttgcaatgggattgaaggattatgtgggagcatttggtaatgtagactggggtttaacatttgcagctatcgttatatctatacttccaccacttattatttattttgcacttaataaatgggttactgcaggtatgacaatgggagcaactaaaggttgataaatagaatgatattaggaggatatgaaatgatatttccgggagatatctcaaagatgccctatctgacacatgggaaaagcagagcaattaatgctgagaacaggacaggagaaaaaggaaaaggcgggatggcagccagcccgcttggaccttcacgtaagggaagcccgtgtttgaataatattcaaccgggacaggaagaatttttggcagatattgagggaccaggtgtgatacagcatatatggataactgttgacagtaagacctcggaaggtgactgttttgtactgagggatctgattatgcgaatgtactgggatggagaagagaatccgtcggtagaagtgccattgggtgatttcttctgttgtggatttggacaggaatgtattgtgaattctgctattataactgttgttccatcgcgaggacttaattcttattttgcaatgccatttcataaacatgctcgcattactattgagaatcagcataaaaatccaataccggcttttttttatcagattgattactgcctgtatgattcgcttccagaagacacttcttattttcatgctcagtggagaaggcaggcaatcactgaaattggaaaagattatgttattcttgataatgtaaaaggaagtggccattatgtaggtacttatctgggactttcagctttgcagaggtactggtggggagagggtgaagttaaattctacattgatggagatgaaaaatatccaacaatatgtggaacaggaatggaagactatttcggaggttcctggagtttcgcatcaaatgaaaatggcagaattgtagaacagaattattctaccccatatttgggatatccattttattccagacatgattcacttgtttggaatcaatatcataatgatgattgtccgccaatgcgtggattttacagatggcatatccctgatcctgtattttttgaggaaaatctgaaagtaacggtacagcaaataggggttagtcataatggattgtttgagcgacaagacgatctttcaagtgtggcatactggtatcagagtgaacctcatcagaagtttaaagaactactaccggtagagaagagatggccaagataaatgttataggaaaagtcctgcattactttttacgagtgaggcgggacttttgtgagtgttatttgatcggttcaaaatcaacagcgagagtgtaatataaagtgcggtatctttaagaaagaagtttcaggattaaatatggcagaaataaagaactcggaatcagatatgagcactcagcagaaagctgagctggacaaagagaaaagaaaagaagagaagaaagaggcaaaaagagcaaaaaggcagcactacagggaactgaatgagccaccaaaactcaccgtgcttgaggaagtgggaaatgcagtcacccatggaataggagcaggactgattcaacattgctgctgtgaattgagattccaaagcgtttttgaaggatatacatttgacaaattacagatttattttcagctacgatggcacccgctatcacggctgggagagccaataaaagttataaaaaagatgaaacagactgataacttcaagtttgcagaacttgaccaaaataaaaccagttcgtaaaatgacatttttacgaactggtttttgcgttgcattttcaaatgatatttatctattttgtaattagccaaaatatctgtcaagaagtcccttaagggctcttccgtgtctagcctcgtcacgagccatctcatgaactgtatcatggattgcatcaaggttgttcttcttagcacatttagcaaggtcagtctttcctgctgtagcaccgaactcacagtcaactctccaagcgaggttgtcctttgtagtagctttcatgttaggctcaaggtcctcaccgagcatctctgcaaacttagctgcatgctcagcctcttcgtaagctgccttctcccagtagagaccaatctcaggatatccctcgcgatgagctacacgagccatgcaaagatacatacctacctcagagcactcgccctcgaagttagcctttaactgctcgaagatgtatttcttatcttcatcagagatttcaggattgttcttaacagttgaagcgtatactccaaactcatgctctgcagcaagtgttaaatctccctcaaccttcttgaatttatctgcgccaacgtggcataccggacactctgccggtggattctctccctcataaacgtatccacaaactgtacaaacccattttgccataataatgttcctccttttaaagatagtaaataaatgtttaattgttgtaaaaattgtcaggctctaggaaagctcattcttgcaatccggacaaagtcccgtaaacgaaactgagcagctctcaatggctaaatcagtggattcctgcacctgtatcatcagctcatcggcgaagtccaaatcgatatccatcacgcgcccacagcctctgcatataaagtgataatgaggcgctgtgttgtaatcgtaatggtcaggaccgactccggtcgaaatcttgatgatctcaccaatttcctcaagcaaggaaaggtttctgtaaacagttccaagactgatgtttggaaattcttttttgatattctgatagatagtttcagcagtcggatgatcggtccggctcgccagaaagttgactatcgactctctttgacgactatacttaatcatatgaatctcctctcaaatgaaatcaggaattgttactgatatcaatatacacgacagtactataattgtcaagagaaaataagaataattcctattttattttctcgagatggctcgaatagctataaatcaagtataaattaataacacgcataatatcactgcttcactcatagaatagtacaaaacgcgcaggcgggtaaataagcatgaagagattcgttacatacctgtatttatatgatggcagaatgaaaggaaataatgcaggctttataaaagtagaaataaatggagaaaaaagtgcatttctcgtacagataaaaaatctcggaaaatactccggaaaaggaaaagtgtatctggtatatgaagcggaggcggtcatagaggcaggagagcttacggtaaaaaacggtgaagcgcgagagatatataatgtagataccgaaaacgtaaaggacagtggaaagacatttttgcaggtgctcggtgtaaaaatagaactggaaaatgcagatgaaaaatttctggcaagctgctggacggataacacggaagcagttataggaaaaccaatcaaggtacaagcagatttatcaaataaggaaacccctgtatcgactcctaagcctgaaccgggctgccagaaagaaatccatagtcaaaatgttgatgacagtcaggacaaaatcaggcgtatagacatatcagagcttcgcacgcttccggccaaaaactggtacatagtcaacaacagttttcttacacacggttacgcaaactataagcatctcgtcatcaaaacggacacggatggcaggcaatatctcggagtgccgggcgtgagcgagccgcaggagcgcatgctggcagggatattcggcttcacggaatttgagccggccgccccggcaaatgcagcggatgtcgatagcggagtgttcggatactggttctgcccgctgtagtttttatagattgtaagaaaatgtcctttcctctgcacaaaaccacagaaattgtgtataattaaagctaacaaaagaaaactgtgggaggtggcattacatgaaaaattattcaaaggatcctgacagacagtatcatatccaggtcgcaaagggagaggtcggcaggtatgttatcatgccgggagacccgaagaggtgtgttaaaatagctcagtaccttgacaatccggtcttgatagctgacaacagggagtttatcacatacaccggcacattggatggagtgaaggtcagtgtgacatcgacaggcatcggcggaccatccgcatccatcgcgatggaggagctgtacagatgcggtgcagataccttcgtgaggatcggaacctgcggaggcatgcagacagatgtgaaaagcggtgacatcgtgattgcgacaggcgccatccgcatggagggcacatcaaaggagtatgcgccgatagagtttccggctgtggcagatttagatgtcacaaacgcgcttgttgcggcagcaaagcagaaaaactttacgcatcacacaggcgtggtgcagtgcaaggatgcattttacggacagcatgagcctgaaaaaatgccggcaggctacgagcttatcaataaatggaacgcatggaagatgcttggctgtcttgcgtcagagatggagtcagccgcgctttttgtcgttgcggcaaagcttggagtcagggcaggctcatgcttccttgtggtcgcaaatcaggagagggaaaagctcgggcttgagaatcctgtggtacgcgatacggacatggcggttcaggtggcagtttcagcagtgcgaaacctcattcgcaaggattgcgccggagaataagtcagacataaaacacagaaacggagaacagacattggatataaatgaaattttaaaacacgttgaccatacacttttatccccacaggctacatgggacgaaatcaggcagatatgcgatgatgcgataaaatatcacacagcatcggtctgcataccgccgagctatgtaagtcaggcgtcaaagtatctgggtgaaaaggtaaaggtctgtacagtgataggcttccctaacggatattcgaccactgcggtgaaagcctttgagacagaggatgcccttgcaaacggagcgaaggagatagatatggtcatcaatatcggctggctcaaggataaaaggtatgagctgatagaggatgaaataaagaagctcaagtccatatgcaaggataaggtgcttaaagtcatcatcgagacctgctttctcacagatgatgagaaaatcaggatgtgcgatatcgtgacgagcgcaggggctgattatatcaagacatccacaggttttggcacggcaggtgcgacctttgatgatataaagctgttttcagagcatatcggagagggtgtgaagatgaaggctgccggaggcatttcttcattagatgatgcagaaagatttcttgagcttggcgctgacaggcttgggacaagccgtgtggtgaagcttattaaggctatggactgaattttcgtatacaataaataaccggggaattatatatggataaaaaaacaattgaaaaactgattgatacagcccttgcacagcttgacttttcatatgcgccgtactcaggcttcaatgtaggtgcagctcttttagcaaaaaatcaggcagtctacaccggctgcaatatagaaaatgcagcctacacaccgacaaactgtgcggaaaggacagcatttttcaaggcagtgagtgaaggcgtgcgggattttgaggcaatctgtatcgtgggcggaaagaaccaaaaaccgacaggttatacagcgccatgtggagtatgccgccaggttatgatggagttttgcaatccgaagacctttaaaataatactggcaattgacagggaaaactataggatttacacacttgaggatatgcttccgcaggggttcggacctgcgaaccttgagtagagtgacctgtagctgtacctttaaggggctgtataatgggctgtaatagttgttgattatatggtggtgtgaacattagccgcctcaacaggaagtgggaaaccggaaatgggggaaatatggagagagaagagaatataagagacaatataataaagctgccgaaaatagagcttcattgccatctggatggctcattaagccgtgaatttgtcgagaaaaggcttggcaggacggtgcaggaggcagagcttagcgtgtcggatgactgcacaagtctcgcacagtatctggagaaatttgacttgccggggcagtgcattcaggatgaaaaggggcttgagggagccgcctatgatgtgcttaagggcatgcaccgggaaaacgtcgtatacgcggaaatccgctttgcaccgctgctttcagagaatgagagtatgagctgcgagcgagtgatagaggctgcacttaagggaattgagagaggtaaaaaggattttggcatagaatgtgggcttattgtgtgcgccatgaggcatcacagcgaggaacaaaacagacgcatgctgcacaccgcaagggaatttttaggcgtgggtgtgtgcgcggcagacctcgcaggtgctgaggtgccttatcctatgtcaggcttcatggagcttttcaaatatgcaaagcagcttgggctgccttttacaatccatgcgggagagtgtggaaatgcacagaatatcatagatgcagtggaggccggcgcggccaggataggccatggaatagccatgagaggtcacggtgatatggaaagacagctttcggcaaagggcataggcatcgagctttgtccgataagcaacctgcagacaaaggcagtggcttcagcagacgaatatcccatcagggagtttttggacgccggattaaaggtcacaataaacacagacaaccgcaccgtaagcaatacaactttatcaaaggagcttgaattcatagaaagaacctatggcatacgcgatgaagagctgccgcttatgatgaaaaatgcactggatgtggcatttgcggatgatgccgtgaaggagcggatttttaggcagctagtatagtgccgcgagatttatggagatttaatatttagccgcagcacaaatttacggaccggaaaatggaggtatgacaccatgaagaaatataacagaatttttgtgatagtcctggattctctgggaatcggcgcaatgccggattcggaaaggtttggagacacagatgtagacacctttggacatatacttgagaggatgcagactctcgacatcccaaatcttacaaggcttgggatgctcaatctgcactgtggcggtcagatgcagccgactgctgagccaatcggcagatttacgcggctggcagaggcgagcaacggcaaggacacgatgacaggccactgggagatgatgggcataaaaaccgaaaagccgtttaagaccttcacagagcacggatttccaccggagctcatagctgagcttgagaagcagtgcggaaaaaaggtcataggcaacaagagcgccagcggcactgagataatcgaggagctcggagaggaagagataaaaaacggttcgatgattgtatacacgtcagcggattcggtgcttcagatttgcggtaatgaggagacctttgatttacagaatctctaccgctgctgtgagatagccagaaaaataacactcaaggacgagtggagagtagggcgcgtcattgcaaggccatatgtgggaaagaaaaagggtgagttcgtgcgaacctcaaacaggcacgactatgcgcttaagcctacaggtcttactgcattaaatgcattaaaggacagtggactggatgtcatttcagtcggcaaaatcaatgatattttctgcggagagggtattacagaggcattccgttcaaaaagctcggttcatggaatggagcagaccattgatatttgtgagaaggattttaaagggctgtgctttgtgaatctggtcgatttcgatgcactgtggggacatcgcagaaatgtgacaggctacggagaggaaattgagaaattcgacaaaaatctgggcattttaatggaaaagctaagggatgatgatctgctcatactgaccgcagaccacggaaacgaccctacctacaagggaacggaccacacgcgcgagtatgtgccttttatcgcgtattcaaagagaatgaagggcggcggcgcaattgaggaggaagccacttttgcggtgattggagccacaattgctgacaacttcggcgtaaaaatgccggagggtaccatcggacattctattcttgaagaactttaaggggtaatatctcagaaattttttaaactttaacagaaaatatatggagaaaaaaatgaacagtatatatgaaaaactcaccacatgccttgcaagtgtgcgtgaaaaaacagattttgtaccagagatagccatagttttgggctcgggacttggagactatgcagagcagattaagatagagacaaccatagattacaaggatatcaagggctttccgacatccacagttcccggacacaagggcaggtttgtatttggatatgtggatagtgtgcctgttgtcatcatgcagggcagagtacattattatgaggggtatccgataacagacgttgtgctaccgacacgcctcatgggaatgatgggcgcaaaaaagctgatactcacaaatgcggcaggtggtctcaatactgattttaatccgggagactttatgctgatttcggatcatatcgcgacagccataccaagtccgctgatcggagccaatattgatgagctgggcgagcgttttccggatatgagcgaggtatacagccgcagaatgagggaaatcgtaaaagaaaaggcagataagcttggcataaagctgagagaaggagtctacgtacagctcacaggcccgcagtatgagacaccggccgaggtcaggatgtgtaaaatcctcggaggagatgccgtcggaatgagcacagcctgtgaggcacttgcagcgcgtcatatgggacttgaggtttgcggaatctcatgtatcaccaaccttgcagcaggactatccgacaaaaagctcaaccacaaggaagtgcaggaaaccgcagaccgcgtggcaaagcagtttacagaactgattactgctgtggtgagagcagtgtaaatgcttagaaacttgacaataaatcgtatcatagcgtatactttagaatcctaactgatgggatggaggatttcaatgttaaatatatatttaggggatatggaaaatgcaatttaccatcctccggtgtattttgataacacatatgaagatgaatggataacggatgagctgtctgtcaaaatgataaaagatatagataaatcagacgtcattggaccacatctggtacaaagcccgatactgggaccgatatccacaaaggaattgtccggtggagtgaaaacccttatgctgatggcttttgatgatagcggaaaaatttttaacgcttcagcgtgtggtgataactgcgcaaagtggatattgagaattgcgggcaaaaagaatttgacaattaatctgcatcatataatggattttggtaaagattttgaggcaaagatactgaatacgggagaaatagttcacagtatggctgaattcatcagtgttgcaggtaaatatgtataggagaaggtatgaagggtaagcataaaattgttgtgaaaaacaatagacttcattatgaatttgaaataaaaagaaatatcacgataataaaaggggacagtgctacagggaaaacaacactcataaatatgatcagacaatttgcaaaccttggtaatgcaagcggaattgaaatcgaatgtgatgccccgtgcacagttcttgagggaaatatgtggcagatgctgctcaaaaatttatcaggaaatatcatttttattgatgaagaaaatcagtttataagacagcaagagtttgctgaacttgtaaaggcgtcagataattattttgtgataataacaagagaaaacctgtacaatctgccatatagtgttgaagaaatatatggactgtattcttcaggaaagtatcagaacacaaagcaaatatatcaggagatgtatcatatttatcctttaaatcaggagctttcatgtaaacctgacaaaataattgttgaagatacaaattctggatatgagtatttcaaggcaatatcgaaagaaaaaaatatagtgtgtgaaagcgctggtggaaaaacaaaaatatttgctatgctagaacaactaaaagctgaaacagagagtatttgtgtaatagccgacggtgcagcaattggcccggaaatggatgcattatataaaatgtctgtggaaaaaggcaatataaagttatatctgccggaatcatttgagtggattatactcagttctgagttgcttgaagacaaagagattaaggatattatggacaagcctgagaattatatagaaagtcaggaatatttcagttgggagcgattttttacaaagctgcttgtggataaaacagcaggaacatacctgaaatatcaaaaaggaaagcttaatcctacatatttgcatgagaagaataaaaatataattttgaaaaatataaaaaatagtatagatttttaaaaagtatgataaattggcgcagacattgtttcctgcgccaattgttatgttaaattataaatggactcatttattaacaagcccgtaaatatagtgattacaccactgcccatgtagtataagataatcatgcaatagcccctcctgcacgaagccaagcccattaagaagcttcatcgaaggtacattccccgggtggacaaccgctgtcaccttgtgcatgcgaagctcattaaaggcaagcttggtgcagaagccgactgcctcagtggcataccccatgtggtgaaactcactggaaaatttatagccaatttcacagcttccgtagaaagccggagcgatattatgtatacacacagtgccgataatccggcacggattttctttctgaaaaacataaaatctgaaaagctgtgatttgacagccatattgtattcatatctgagcaccttctgcaggtgcttcacagtataaaagtccggcacacggtctatttcatacatttcgaaaagctctttatccctattgtaaaaatccaaaacctgcggagcgcaatcagcgcgcaataccttaagaagcaggcggggggtttcatattgaaaaaacatattttccttctttcacatttggtgtatcatgtaattattcaaaaccacctcacgcacattcgcaaaagcgcacgatactcgtgctttgtcactgctacgcagttaattttgctcatatgtgcggggtggctctattcgagccaccttgagaacaagaaaaactgctgcttacatgcgagcatgacgcatcagcttttcttgttctcagtggttctgaatagttattgtattataatagattataacacatggagcagacaaatatgacacaagatgaaaaatatatgaaacaggcaataaaacaggcaaaaaaagcatacgcactcgatgaagtgccgataggctgcgtaattgtagccggtgacaaaatcattgcacgcggctacaaccgcagaaataccgacaaaaatccactcgcacacgctgagctctctgccatccgcaaagccagcaaaaagaccggagactggcgtcttgaggaatgcaccatgtatgtcacccttgagccatgtcagatgtgtgccggagcaatagtacaggcacgcattcccagagtggtaataggtgccatgaatccgaaagcaggctgtgcaggctcaatcatcaatctactgcagatgcagcagttcaaccatcaggtgcagacagatataggcatctgcggtgacgaatgcagcactatgctctctaccttcttcaaggagctgcgaaagaagcgcaagcttcaaggggagtaaataaattgtggttaaaaccacaacgtaaggcacgtaagccccgggtaccggactcacacgtactctcccgaagcgcgaatagcgaagtggtttagatactgtagaaattatgcccatgagacacagaaacgccccggcatggatgcaggggcgaggagaaccgcgccatggacggcgcgtttcgacggtttcgtcaagtatagaaaaacctcaagcataatttcgtacagtatcttagccacgtagcgtagcgatggcgggagagtacgtgtgagtcagtagtacccggggcttgcgtgccgtactcatcccacaagaagttgcaataaatcttgacaaaaccccgcattatagcgtatacttaagactccgagcagccggggtggtagcggtaccttgaaccaacaatccgctatagttggggtgatgcttcgtagagggcttaagcggtggagctgccctccataagtggcgttgacgtctgggtcttgcgcaatggaaatctatgaaccgtgtcagggtgggaacacagcagcactaagtagaagctttcatgtgacgcgaggcagcctggagggagttaactgtggaggtaacgtctgttgtgatggttcgaagcgaggcgctcggatttttagcgtataaaaagaggcgaattttcggttgtagtggcacggtttatacgcgcgtataaacatcgtatgataacacagttaatcagcggaaaaaaggaaaatcgaggcatacaatgattcaggacattgcaccacatacgtgggacataacatacaaaaacatacagccggacccggacagcagggtccttttttttagcaggggacagcttcttgtgaagcaggcatcggacatgcctgctgacgaatccaatcaggatattcatcagataagctttccaagatatgaggatataaaagcagaatgtcccgatgctaaatatcagtatctgtttacacttgacgatactgcatttttcagggtggcactgtcacatgctgacaaaatgcatatactggaagtaacaggtggcaaattcataaaccggcactatatgcgcagcgcggcaccgaaggagtacgtgcttgccgcgataacgggatttcatctggatggctggtatgataaaaaccatttctgcggcagatgcgccaacaggctggtagaggacgacgtggagcgcatgctcagatgtccggtctgtggcaacatggtttacccgcgcatcaatccggcagtgatagtgggagttacaaatggagataagctgcttttgacaaaatacaatggcagagagtataaaaagtacgcacttgtggcaggctttaacgagataggtgagtcgcttgaggagactgtgcgccgtgaggtcatggaggaaacaggactgcgtgtgaaaaacatcagatactacaaatcgcagccgtggggctttaccgacaatatacttgcgggatatttctgtgaagttgacggaacagatgagattgaggttgatatgcaggaactttcggtggcaaaatgggtgtcaagagaagaaatacctacatccatagaggaattaagcctgacaaatgaaatgatttctgtttttcggcttgacaaaggcgatttctgaatgtatagtaaaacagtaggaaatgaaacagaggtgctataaatgaaaatttcaacaaaaggacgttatgctcttcgcctcatgatggatcttgcagagaacaacactggttcacccatcagcctgaaggatgtagcgaagagacaggatatttcagataaatatcttgaacagattatatccattttaaacaaggcgggctacgtcagaagtgtcagaggcgcccagggcggatacatgctgaagatggaaccgcagaactacacagtcggtatgattctcagacagacagagggcagccttgcgccggtagcatgtatagaggatgacgagatagtctgcgacagacagcagcagtgcgtcacatctattgtgtacaagaagatcaatgatgcaatctcaggtgtggttgacaatatcacattgcaggatctggtagactggcagaacgagaagaatggaaattatgtcatataaagaaagaaggttatcatagatgagcagattaatttatttggataatgcagcaaccacacaggtatatccggaggttgtggatgcaatgcttccttactttacagagcattacggcaatccatcagctatatacagctttgcagatgaggcagaaagagcagtggatcatgccagaggagaggtcgcagaccttattggagctaagaaggatgagatatatttcacaggcggcggcagcgagtccgacaactgggcattaaaggccacagcagaggcatatgctgcaaaaggaaagcacatcatcacatcagccatcgagcatcatgcaattcttcacacagcacagtggcttgagaagcatggctttgaggtgacatatgtgggtgttgatgaggacggaaaaatcaagcttgatgagctgaaggcagccatcagacctgacacaatccttatctcagttatggcggcaaacaacgagattggaactatccagccgcttaaggagatcggagagatagcaaaggagcatgacattttgttccacacagatgcagttcaggcattcggacatattccgattaatgtagatgatatgcatatcgacatgctcagcgccagcggtcacaaactcaacggaccaaagggcatcggcgtgatgtatatcagaaagggcgtaaaaatccgctcatttatccacggcggagcacaggagcgccagagacgtgcgggaacacacaatgtgccgggtatcgtaggactcggcaaggcagtagagcttgcaaaggccaacatggcagagcgcagtgcatatgagacaaagctcagagaccacctcatcgagagagtgacaagcgagattccatatacacgcttaaatggacacagaacagacagactgccaaacaatgcaaacttctgcttcagattcatcgagggagagtcaatgcttatcctgcttgaccaggcaggcatatgcggcagctcaggttcagcctgcacatcaggctcactcgacccatcacatgtgctccttgcaataggactgccacatgagatagcacacggctcactgcgtcttacattatcagagaagaccactcttgaggatatcgactatacagtggacaagttaaaggaaatcatagcaaggctcagaagcatgtcaccgttatacgaggatttcgtaaagaaaaacggtaaatccgaggcataaatgatcaggtcaaaattatagtgactatcacaacattaatatatacatgaaaattaggaggaactaaggacatggcatacagtgaaaaggtaatggaccattttaaccatccaagaaacgtaggagagatggagaatccaagtggtgtcggcacagtaggaaacgcaaagtgcggagacatcatgagaatgtatctggatatagatgacaacggcattattcaggaggccaaattcaagaccttcggatgtggtgcagcagttgcaacaagcagcatggcaacagagctcgtaaagggcaagacaatccaggaggcacttgaggttacaaacaaggcagttatggaggcacttgacggacttccacctgtaaaggtacactgctcacttctcgcagaggaggcaatccatgcggcactctgggattacgcagagaaaaacggtatcaagatcgagggacttgagaagcctgtaaacgatatcagcgagaaggaagaggcgcctgaggaagactattaatgaaaaagaaggttgtagtaggaatgtcgggcggagtggattcgtcagtagcggcatatttattaaaggaacagggatacgacgtcatcggagtcacaatgcagatatggcaggacgaggacgtatttaaacagtcacaggagggcggctgctgtgggctatccgcagtggaggacgccagacgagtggcagcagtgcttgatattccgtattatgtgatgaacttcaaggctgatttcaagaaatatgtcatagactatttcgtgtccgaatatgagcgtgcatacacgccaaatccgtgtatcgcctgcaaccgttatgtgaaatgggagtcgctgcttcaccgctcgcttgagataggagcagactatatagcaacaggccattatgctcgcatagcacagcttccaaacggcagatacaccatagccaactcagtcacagcggaaaaggaccagacatatgcgctttacaatctgacacaggagcagcttcgttgcacgctgatgcctgtgggagagtatgaaaagccacaaatccgccgtatcgcagaggaagcaggtctgccggtagcgcacaagagcgacagccaggacatatgcttcgtgccggatcacgactatgcctcattcatcgagaatgagacaggcaaaacctatgagccgggaaacttcgtggatgaatcaggcaatattctcggccgtcataagggtctcatccactatactatcggacagcgcaaggggcttggaattacagccgcaacacctttattcgtgaaggagctgcgtccggcaacaaatgaggtcgtaatcagcacaaatgagtcacttttctcagacacatgttatatcagcgatataaactatatggcacaggagcacatcacaccggacacccgcagtataggaaaggtacgctactctcacaggggagctgactgtacacttacccctatggaaaacggaatgataaaatgcgtatttgacgagccacagcgcgccatgacaccggggcaggcagcggtattctatcaggatgggcatgtactgtgcggtggaacaattgaaaagatgatggtaaattagcaggacttttgaatagtcgcgaatatattataatagagcagacagcataactaaaatgccgtctgctctattaaattatagggaagtttaaacaactagaagttatctgtgtatcgtacagaaaaaatttcaattttatgtttatctctaactcaagaattctataattgttaatatcaaagatacaataatacatattgctattattccggaaccaaaaattgctactattttcatttgtttcgactttctattttttattttttcaagtatacctgttgtataaagaaccattgtagccaacgctccaacacctaagcctaaacatgttcctttcatacactcgtatatcggaatcatagaatcataattaattgcttccataactaatcctataactaaagatattagccctataatacttatcaattttactctctttaatattactgacttttctgcacctgcataattagacattgcttctgcaacttcttttacttctttttccataatctcgcttttcctttctccattgatgatttcaggaatacttacattgaaaaattctgcaatatcaactaatagactaatatctggcatattaaccccgttctcccttaattaaagatattgttgggtaaaaaagaaaggtcagtcgattttgccgatgaagcggtagtagatttctacttcctgttcacggcttccgtcctcgcccttgacagcttcgtggacggttattttttcaattagagtgttcagaagttcggcggtcagctccacagggttgacatactgtttcattagggcaatccacttttcagcatccgctgcggtctgtacggcggcttccatc

SEQ ID NO: 1533 - DNA, 1388 bp, Unknown
  gut microbiota DNA sequence
ctcgttaagtaatacacttcggagcatgccgatatttcaatgtatctacaaggaaaaaattctactgttctcagttagtatgggctgcatttaaagataattacggaatcgacttagatacgtccgattttggagatgcggtacatccgatggaacttgtaaattcttcaaaaacatatactatttataaaaaataataatgttttaagtaatattttgtgatgactcggcctggaaaatttgtgtataaattaatgtttctcaaattttccaggctgatattttagatgaggtatgtgtatgaaaaaaaaattttttacaatttgtgcaatagtgtttctaggatttactggatgtacgcatagagagagtgcgaatatagatctaacaacttcatctgttggagttattgaaacaagtggtaatagtaaaaaaagtagaatttacttttataatcaaaatttagaaaaaacagctacgcttccattggaatacgcttcattaggaagtattttttataatccagtaatttatgaagatgaactatatttgattcctcaaggaaaaactaatgttaaggatgaaaaaaaggttctgaaaattgagttgaaaagtgggaatcaaaaaatctatgaaatcaatcagttggcaatgaatagtatttgtgttaatgataaaaatatttatacttgcaatacgttaaacggtgattcgtacattaataaatgtagtaaagaaaataatcaagtcgtaagtgagaaaattgaaggtgtttatgtaagcaagctattgtgtagtaaagatatgttatttgcatttgctactacaaaatacggaaaagagatgaattcttacatttacatttatgatgctgaagaactgagttttgatgagaaaattgatattacaaattatggaggtactcattataaagcaattcttttcgacaacaacatattgttttcaaactcagtagattctggtgatcatccatgtaataccgtttgcatatattcgataaatgacaagacgatagaaacaatttcatttgatcaatattatccactagatttggccgtatgggataacatacttatcgtttctcactttgacttggtaaaaagagaaggtggaagtatatctatatataacttagaaaccaaagagttaaataatatagaacttggacatgatgtagagcaaatgacgattaatgagaatgttatctatattttatcagataaaataatttatcaatatgaattaaaagatatgaatttgtatctaaaatgtaagactcaaataaaaaaatcaaatgaagaaaattatctttcggggattttttatattaaacctgaatccatgaagttcactctttaataagtcaa

SEQ ID NO: 1534 - DNA, 6552 bp, Unknown
  gut microbiota DNA sequence
tatttttcagatattttatattattaaacacaaaaagacggttgaaaaatcagccgtcttttatatttggaatttatgattttattatgaaatagataacacatcctccacaatctgctctacagtcagatgattctccttcagtacagcatccacgtcatacctgtcaagaaattccttcttcaatccataattcatcactttcatattgcctgcaccatagaatcgtgcgattttttcaccaaagccgccatctaaaataccatcctctaaagtaataacagtatcatgattttgcttaagcttagtcaaaagcgcttcatccaatccggtgatgtaatacggattgattacagttgcgttgattcctgcttcttctttaagaagcttcgcagcctcctttgccagttcaaagaaggttcccagaccgataatcgcaatcttttctcctgtctgagccacctcatatctgttgagtctgccaaaatcctttgtcacccttgagccatctgaaatcatcggtccacccggcagctttattgcaaccggataagatgtctgctccatactccagtcgagcatggccagatactcttcctttgttgccggtgccagatataccagatttggaatatttgaaagcatcggaatatcctgaaagcctaagtgtgtaacgtcattcattccatatacggaaccctgatatattaccattgtaatcggactgttattgatgcagacatcctgtgatacctggtcaaaggttctctgtacaaacgaactgtatacaccataaaatggtttaccaccatttactgcgatacctgatgccaatgccactgcagtctcctctgcaatacctacatcgacaaactgactgccaacttcttttctcttatcctctgtaaagcccataaccgtcggcgtaccggaagtaattgcaacaacagaagaatcatttttcatcttttcaagcagatattcacaggtcacagaagaataatcctcttccacattgtcaaatagtggctttcctgtttctatatcgaatggaccgctgtaatgccactgctccttacatttttctgctggtgcatagcccttgcccttaagtgtgtttatatgcactacaatcggtttagtgctgtccttgacctctttaaatgccttaataagagctgcaacatcgttgcccctgtccacatacacatagtcaagtcccatagccttaaacagattgcattctgtctgaccgtcagtctttcgaagcagagcaagattctgatagagacctccatgattttcagcaatcgacatatcgttgtcatttactataataataaaattgctttgaagctcagcagcaaaatcaagtccctcaagtgcttctcctccacttaatgagccgtctccgatgacagcaatcacattgccgttttcaccctttaagtcccttgcctttgcaagacctgcagccagactgaccgacgttgatgtatgtccgactgtaaaaaaatcatgctcgctctcatttggatttgtatagccggacacatcatcatagtgctgttcagacaaatacgcttccttacgccccgtaagcatcttatgcggataactctggtgcgatacatcataaacaatcttgtccttaggtgattcaaatacataatgtaaagcgattgtcgcctctaccattccgaaattcggcccaaaatgtccgccatgcttacttgctcttaccaaaagggcatctcttatctcctgcgccagcaccggcagttcatctatcttaattttctttacatcttctggtccgttaattttctcaagatacatattatattttgtcctcctatttgtcccaggtcaattcacctgtctttatcgcattctcgtatttagaaattttatactgtaagcgttccatcgtgttttcaatctgttttttctgctgatcaagctgctcgtattgctccttgagaagctgacaccttgcttcaaatgtggcatctcccatctgaaaaagcctgatatattcaataagcgcctcaatcggaactccggcattgcgcatacatatagtgtgctccacccagctgatatctgattctgtataatcgcgtatacctcctgcagtccgtgcaatctgtggaatcaggcctatgcgttcataatacctgagtgtatcagtagacacaccaaaacgctcactcacttccttgatagtcactcacatcgcctcctttttgattgttacaatgaaactatatcacttggagtccactccaagtcaagagcttttcatcttttgtatacataagaaaattatcgtgttataatctcaataataaaatttaaaagatttacacttggaggaaaaatatgaactatacagaatgtatcgaaaatgccagaccacgtcttggaaaatactgcaaggcatgtcctgaatgcaacggccgcgcatgcaaaaaccagatgccaggtcccggctcaaagggcatcggagacacagccatacgcaactacgacaaatggaaacaaatccgtgtaaacatggatactattgccgaaaataagcctgtagacacctctctctcactcttcggccgtacttttaaatatccggtatttgccggtcctgtaggtgcggtacagctacactacggagactgtctggatgatgtgacatacaacgatatccttgtgtcagcctgtgcaaagaatggtatcgcagctttcacaggtgacggaactgacccaaatgtcatggttgcagccaccaaggctatcaaaaatgcagatggtgcaggaatacctaccgtaaagccatggaacattgagaccatacgtgagaaaatggagctggtacatgaatcaggcgcatttgcagtagctatggatatcgatgcagccggtcttccattcctcaaaaatcttgatccgccagccggaatcaagacagtttcagagctttgcgatatcatacagatggccggaaccccatttattgtaaagggtgttatgactgtaaagggtgcgcttaaagcaaaagaggcaggcgcaagcgctattattgtatcaaatcacggtggacgtgtgctggatcagtgtcctgccactgctgaggtgcttgaaagcatcgtaaaggctcttgaaggctcaggcattaagattcttgtagatggtggcatcagaagcggcacagacgtctttaaagcccttgcactgggtgcagacggagttcttatcgcaagaccgtttgtaacggctgtatacggcggtaaggccgatggtgtacgtgcatacatagacaaaatcggtacagagcttgaagacaccatgaagatgtgtggtgtatcgtcgcttgatgaaatcacaagggactgtgtgatgacattctcataatttataaccttgttgtccactttgaacaatcccacacatccgtcgcaagcccatcatagaaatccggctcgtggcataccatcagtatgctgcccttatattcctttaaggcgcgcttcagctcatccttagcatccacatcaagatggttggtaggctcatccagaagcagaatatttgtctctctgtttatcagcttgcacaggcgtacctttgcctgctcaccaccgcttaacacacgcacctgactttcaatatgcttcgtggtcagaccgcacttggcaagcgcgcttcgcacctcgtactgcgaaaatgcaggaaactcgttccatatctcctcaatacatgtggttgtaaccgactgatccatctcctgctcaaaatacccaatttccagataatctccaagtgtaacacttcctgaaagcggctttatcagcccaagaatactcttaagcaatgtcgtctttccgatgccgtttgcaccggtaagaacaatcttttgtcccctctccatctcaaggtcgagagccgatgaaagcggatcatcatagccaatgaccagtccatttgtctggaaaatataccgccccggagtacgcgctgtcttaaagttaaactccggctttggcttttcagcagcaagctcaataacatccatcttgtcaagcttcttctgacgtgacatcgccatattccttgtagcgacacgcgccttatttctagccacaaaatccttcagctctttaatctcctgctgctgtttgttgtacgcagcctcaagctgggctttcttcatctcatagacttccataaacttgtcataatccccgacatacctgtcgagcttcttgttgtccatgtgatagatgagatttaccacgctgtttagaaacggtatatcgtgcgaaataagaataaacgcattctcataatcattaagatatcgcttaagccactcaatatgctccacatccagatagtttgtaggctcatccaaaagcagaatatccggcttctccaagaggagctttcccatcagcactttggttctctgaccaccgcttaaatcggtaacgtctttatcaagccccaggtctaaaagtccaagagcccttgcaacctcctcaacctttgcatcaatcatatagaaatcatgcatggtaagcatgtcctgaatcgtgccggcttcctccatcagcttattcatctcgtcctcgtccacatcgccaagacgcgcatatatgtcgttcatctcattttccatatcataaagaaaatcaaatgcagatgaaagaactgagccgatagtcatgcccttttcaagcgctgtgtgctggtcgagataacctacacgcaccttcttggcccactctattttgccctcatcaggcataagcctgcctgtgataatattcataaaagtcgattttccctcaccgtttgcaccgacaagccctatgtgctcgcccttcaacagtctgaaggaaacatcctcaaaaatagcacggtcaccaaaaccatggcttaggtgctctacgtttaaaatactcatgtatacctctcttcaagattttattttcccaatatggcactttcttcaagatttagtctgtatgctcatattgttttgccagtctgttaagctcatcatgaacctctttcaccagattctccgggcctattatcttaaaattatcccccattgccataatccaatgaataaaaagcttgttatcagctaccttcacaaaaacacgcgaatgagcttcatccttctttaagattgtcacatcagttccaaacctgtcaagcaggacacctatagcgctgtttttgcacagtatctcagcctttatctcttctccattgtacataccaaacttcgatttgccataagaagcaatatcgagttttttaagcttctccctgccctcacggactttattttcaatcaggatattcttcatcttgtctacacggtaatgacgaatatcctttacctgtgtatcatggtcatatccaatcagataataattgccatcattccacagtaatccccatggactgacatgatatcttgcgccgtcatgcttcacctcaagctcttttttcgtattccaccggcaatattgaaaagaaaggcttgaattatttgcaattgcattgtgtatggcatcgacatttttcatgatgtcgctattcatggttttcactcttccggcaacatatacctgacgctgtagagtggcagcctcctgtctgcttgtaagactctccagcttcttaataagctcattggatttctcctcagtgatgaacttggcagccgcgacagaatccactaaaagcttaagctccgccagctcaaatgccctgcctatcaccttataatggacagtcctgccatactgcgtcttttgggttttgataccaaaatcattcagctgtgctatatcatcatacagactttttctcgcggccgtgacatcgtatgcatgcagcttatttaaaatctcatcaagcgtaatatcatggttagcatcagtattattcaaaagaattttggccagatacaaaagctttagcttttgattgttcctgggttccttagattgcttcccggcagtcagctcattgttttccgtttcactcatatacacttatctccccatcaatttgtattgtaactattcagaaacacacacacatttgcaaaaccgcacgatactcgtcacttgattattgcagcaagtttttcaccacacatcacaccgagtatacatcctaaacagctcaacaatacatatccgcacccaagcaggcagtgattatgttcaaacagattataagattccagcgaaaatgtagaaaacgtggtaaagccaccgcatacaccggtcttccaaaacaaaaccatattcttggatactccatcccttgcacttgtgattccgacaataaatccaatcagaattgccccgattacattggtgattaaagtcaaaaaaggaaattcagtttttaaaggtataaggctgatggcatatctggccattgcacctacggcgccacccagtgctacaaataaaaaattcatggtggttatctgccactcaaaatgtgttcaaatatactcaa

SEQ ID NO: 1535 - DNA, 11529 bp, Unknown
  gut microbiota DNA sequence
aacgtgtgataattaacttcctaattatcatacaaggaagtaaaatgaaaaaaattggtattagaatattagggtgtatggcattattgtcaatggttggttgtggaaggatagaaggtgcaagtgttcaggatttaagcaatactaaagatgcaattgttgaaagtgaaaccactttggcagaaaataataatgaatattcaaataaaaattccctattttatagtgatatttctagttatgaaatttttacagatgtaaatagtgaagctgcgttaaaaaatctttactataatattgatgaatttattgatagtgactcatcagatgtcattgtaaaaggaaatattatagaaatagaatatgtgtatattgatggatgttcttattctgtgcttaccgttgatgtggagagagcatataaaggcgaggtgcaggaaaccatcactgtgtatgaggatggaggatatactcggctgagcgatgaaaaggaacaaattgaagcacatgccgatttgtcacaatacacagaagaagaaatggaaaatttgctaattaaccatacttttatgggtgcggaacattcaaatgttggagatactgttattctatttctgaaaacaaatgaaggcagtattctgggtgacagttatcgaattaactgttcagtctttggacggtacactttgaataaagatagctatattagacctgaatttattgttgagaatgataatccagagaaaataacaacatatagtaatatggatacattcgagttttcggtgtctaaatcaatgcttgaagataaactttcacagcagtaaaatgtctatattggaaatatttgaaaaaagtaaatgtttgatataacagactatcaaagaaaattatgcattttttctatggggtattcttgcaacagtgatgtaatttaataggcacaggaatatgtcaaaagaccaaaacagaaagtgttaatgataataggtgtttactgttataacatttgttatttaaagggactgtcgctttaacgatttagcatgacagcccctttttcgaatctcttttttaaaatattatagggaagaaacaagatggactagaacaagtcccttttcatcatgcatattgcataaaataatgcaaaaagaaccaaaatgggttcataggcatggtgaaaagggatggaacagaaaataaagcaagatgagatatttattggtaagaatatccggcgtataaggaaagaaagaggaagaacatttgctaaagagatataattatattctttaagttcggagacagtagtaatgccggcatatgttaatgcaaatttggtaatagaagaaagattaagctgttcaaaatgttgattttggtcattttctacaaatataggtcgatttctgccttttatttgattgttcgggtgagaaatagtaatatatgactgtaaaatggttttatattattctaattgaacgagggaaaataagctatgtttatatggaagtaaataaagtttttgttggaaggtgccaaaatataaaaatatgtacaaaattaaaaaaacacaaccaaccaaacgaggaaatatgcaaaatttagagaggggggaaaaacgtatgtttagaattgctatatgcgatgatgaaaagatttttagagatgacctaaaggaaatacttatacgttatatgactgacagaggaataatgcttgaaattgatacttttagttcaggaaaagaatttgttgaactgggaattgaaatggtaaaatataagattgtttttctggatatcaacatggatgaactggatggaattatgacagcaaaaaagatccgggaaaacagcaaggatatgtttattgtttttgttacagcctttgtaaactatacgatagaaggatataaggtagatgcagtaagatatattttaaaggacaataaaaatctggttgccagtgtttatgagtgcatggatgcaattcatgaaaaaatggattataagattacttgggctgaatttgatttctgcgaaggtacaaggaaagtttcattgaatcgcatattgtatattgagagtaaattacataaattggagtttcatgtaatggaggattgtctgcaaaaatatacattacaagggacgctaaatgaaatagatgataagtttgccggaaatgattttctgcggatacatcagagctttctggttaatatgaaattcattaaaaatataagcagatacagagtattgctgaataatggaattctattagatatagctagagcgagatataaatatgtagaagaaaagtttatcgcttatagaggtgaagtataaatgtttgtttacattcagagtcttatgattatgatgttggaaatattatgctgcaaaattttttttgaagcatttggaataaaaagagaggaaaataattgttggaaaaattatagtatagttatcggattgacagtgctttgctattttattgcaatgatttttcgagactattttattgtaaagcaggtattttcaattattctcataacattctttatgttgctttatcttaaactgagttttggtaaggcgatgattttatcagcattatttgagagtcttttgctcgtgatggattatttcgcgttacttatgaatatttatatttttcataacatggaagaagtatgggaatcacatgttatacagggttcattggtcgttgttttaggaaaggcattgttactttttgctgtattaattattagaaatcatatggagaaaaaatctttggctatgctggcagatacagaatggcttcggtttatttttttccctattttcacaatatgtgttattacagctatgataaaaatgtctgaagatataaaaaataaagcccaggagaatttattttttgttatagcgtgtggattggcgggaatgaacatagttgtattttatttaatatatgatattttaaaacgagaaaataaattgcaggaggaacgtatttataggatacaggttaaaaaccaaataggtatgtatcgttctatttctgaaaattttgataaacaaaagaaaatgacacatgaatataaaaatcagattatgtgcattgattctttgataaaaaagaagaaatatgattcattggaaagctttgtaaataaaatcagtggtcaaattagtaaagaattggattttatttgtacaaataatgtgattgtggatgcggtattgaatactaaatatcaggaaataagggataaaggtattgtttttgtatttaaaattaatgatttatcatctttgaatattagcgatgaggatgttgtggttattatgtccaatttattaaacaatgcgattgaagcatgtgaaaagtgcagaggggataaaataataaaattgaaaattgttatagaggacaataatgcgattatatcggtgaaaaatacttatgagaatgctgttatttatgaaaatggagagatacagactacaaagattctggatacagatgaacatggaataggaataaaaaatatagctgaaacaataaggaagtacgggggctcttatgtgattcaaaacgatgaacgagagttttatttttccattatgattcctctagtgaaaagtgatttctgagaacaaatcacttttttgtcgttttctgcaaaataagtacactttctgcaatagaccttgttaagaaattgtgtattgttatacttacagtagaaggaggcgttgatatgattgagaagatggcaatggggttggttgaccaaatggctgaggaaaaaatgattgacaaggaagcggaagaatattatgtctatacgcttgtttcgttaatggaaaaatttataaccattggaactattttgctaataagtgtactgattgagaaattagttccaacagcattctttttgttattctttttgtcattaagaaaaagaacaggcggatatcatatgaataccttttttcaatgttatttgggtacagtggttacttatatgcttgtcttaggtttatgtatggttctggttgactatccgcagctggtttttggattattattagttgcaatttgcatagttgaagttatagggactgttaatcatcccaacatacatatggatgcggtagaactgtcagaatcaaagagggcggcaagaattttgtgtgcagttgaagtgtgtgttatttacacttttactttgctcggagccgatatgatgtatgtttgccatatggcagttgctgttatattatgtgcggttctgttgctgatagctaaaatattaaaacaggaggtaaagagaaatgaagaaaattaacaaaaaggtattgaaggttgtggagagggtgataagaaatgagattaagagagccagtggtgatcctccgttttgtttggggatatttcatcaaccgaaaagaccggtagaacataaatgtaatagagaaaataaataaagaaataaatggtagtatatttcttcacagactccttaaatcctataatttcaagcttttgcgatactttgttgttcatatcattattcacccaccaggtgaagaaaatatatggtaaaatagacgtaacaaaacctatagattggagtcttttaccatgaataacaaccaccgaatcacactgagcaccaataagaacattattgttgagtttacaaatgatacaataaatcgttctgaataaagtgtttttcaggaaacatccaatttaggaattttgattaagagagagataataaaatgaaaatatgttatatagttgtttcagcttttttgattattttctatccaagacaattaacacatcttatgtgctttgggagacatcgtgataagaatattgtcaaaagcaaagctgcttattggggaatatatttgttttggacaattatttttttgattggttgtctgatgatgggttcagcgatgaaagtaaattctacaatggataaattagtgtattatttcattttaggaagtgataatagggattgtgttgaattgggaagtgaagagaatgatgaggcatatatttctacatattatacacgaaaggaaatcaatgagagctttttatttgaggttgtccaaaaacatgaatatgcatatgagatgtgtcaattacaggagttgataattaagaaacaggatgaaagatggatactttatttgaatgatgaggtgatgggatatgtagaagtaaaaaaaggttttttaattaaggagttttgttttgtgtgggataggcaaaaaatagaccaaaggagacagttatatgagtaaaaaaatgtgcaagaggatattttcagtaattttatcattaggtcttgttatggttcaatccatgaatgttaatgcagcaggtaatgaaattggtaaatattcagtattcgtttagtggcagatatgcggtgcggacaggcatctatttgggattttaaaaaatagcaaaaatctctggacactgcaacaaacaggagcctcgcaggaacactgctgtaaaatccgcttagtatgagcgtattttgcagcaagtgctcctgcgaggctttgtcatttaatccaataaacttaaaacgctttatttcttcttccacgcaagaagcctctcaatatgcagcggtttcccctgaacagcctgcaccttcaatctgttttcctcactgaaaccaaccagaatatcatgattagcctcagccagataatcgatgataccatcgatatcagacttcgtgttcttcggacaatgaatatacagatgcttatttgcggaaatatgcagtgtatatgagatgctgaaatgataccacagaatcttgtgcagggtagagtatttgtaaatccataaaatctctttgataggcacgatggcattgccataaggcgaggtcatgataaaatagtgctctgtgataaacatgtcctcggtggcaagctgtggcagtgtcgcaagctcctcctcagcctcggcaagcagcttgtgcggattgccaaatacaacaagattctgacatgccggtgccaaaacaggaaacctgatgcataggatgtagaatatcaggctgataacagcatagatgagagtgccaaaataaaaaacaaacataaaaatagtagttttcaaatggtactcaggctcattaagatagtagcctgttatggtatcggagagtcccttggaatcccaactcagatccttcgacagtttatttacaaactgtgtataggtgcccttgccctttacaattttgccgaccactgtgagcttatctatagagggcagaccctcctcacaggtggatggtgcaagcagaacaatagagcagtgcttatcgcgcatgcagtagtagtaatagcccttgatatcgttgccgtccttcatggtgtagccggtaaagtaaagctttttaagggtggtttttacatatctgtccgaatccttgtatgcagcttcaaagctgacagaatcgtcaatatgtatgggcgataaaatatctccgagtgaaaatgcaaaccatagcacggtaagcagaatgatgtatacaatcggagagaaaagacgccttttgtaaaatgctttgatgttttttgttatgtagtgttcgtaattatcaatcatatgcttagtataatggtttttgtgccttatatcaaccttgattttgagacatttaattgttattatataatcaatagtaactattcagaaccactgagaacaaaaaagctgatgcgtcatgctcgcatgtaagcagcaggggttctgtaacacgaaatgaggtaattatggaagcatacacgagttttgcccgggtgtatgacatgttcatggacaatgtgccatatgaggtgtggggcagatatattgtcgaaaaactgcgtgcaaatggcatagacagtggatatgtcgtggacttaggctgtggtacgggaaagcttaccacgcttcttgcagatgcaggctatgatatgataggcattgacaattcttttgacatgcttgatatggcgcttgagagagaggatgacagaatcctttatctgatgcaggatatgagagagtttgaaccgggagaaaaggtgagtgccgtcgtaagcgcatgtgacagcatcaattatattcttgagcctgaggatcttcaggcagtttttttctgcgtgagcgaaagtcttaaagagggtggcatttttatatttgatatcaatactccatacaaatatgaggtgctcatggctgataataccatagctgaaaaccgtgatgagggcagctttatatgggacaattattatgatgccgatgagaaaataaacgagtatgacctgacactttttataaaggagcagtcagaggatgaggatgatatctacaagaagtttgaggaaactcatttccagagatgctatgagatttcagagcttaaggagcttcttgagcagtcgggacttgtgtttgatgcggtgtatgatgcgtacacagacgatcaggtgaagtgtgacagtgagaaggtcactgtaattgcacataaagcatagaattagataatgagaggtaaattatgtcagattatatagtaagagcaacagcggcggatgccaatatcagagcatttgctgtaacatcaagggagatggtggagaccgccagagaggatcacatgacaacacctgtcatgacggcggcacttggcagacttctttctgcgggagccatgatgggagctatgatgaagggagataaggatatcataactcttcagatacagtgcagcggacctgcaaaggggcttaccgtcacagcagattcgcacggcaatgtaaagggctttgccattaatccacaggttgagctgccactcaatgctgcaggcaagctcgatgtgggtggagcgcttgatcttggaatacttaccgtcataaaggatatgggcttaaaggagccgtactcaggtcagtgtgagcttaaaacaggtgagatagctgaggatctgacctattattttgccacatctgagcagattccgtcggcggttggtcttggtgtgctggtggataaggaccagagcgtgaagcaggcaggcggatttatcatccagcttatgccgtttacaccggatgaggttgtggacaggcttgaaaagaaaattacagagattgattctgtgacacagatgcttgacagggggctgactccggagcagatacttgaggagattttaggagatttcggtcttgaaatcacagatacgactgagacacgtttccactgtgactgttcaaaggagcgtgtgagcagagcactttccacactgagcaaaaaggatcttgattccattatcgcagatggcgagagcattgaggtaaagtgccagttctgtaataaggcatatgagtttacggtggatgagttgaaggagatgcgctaattgaaggacggatatataaaggtcgctgcagcgacaccaaaggtaaaggtggctgatactgtatacaacggacagcttattaaagctcttatgaaggagtgcactgacaacggggcaaaggtggttgttttcccggagctttgcattaccggatatacctgtcaggatcttttctggcaggataagctcattgctgcagcagaggatgagcttataggaatagctgattacagcaggagccttgacggcatatttttcatagggcttccatatgagataaacggcatgctctacaatatggcggcagttgtatcgcgcggagaagtacttgccatggtgccaaagacatttctgccaaattacaatgagttttatgaggcaaggcattttgcatcgggtgaaaacttaagcacatatgtcacactgaaaaatggacagcaggtgtctgtagatactgattttatttttagctgcaagcagctgccaaagcttaagatagcggtggagctttgtgaggatctttggactccgaacccgccgagcatcagacacgcgatgtcgggtgccactgtgattgtaaatctgtctgcatcagatgaggtgacaggcaaggcaatatacaggagagagcttgtgagcggacagtctgcccgattaatatgtggatatatttatgcgtcagcgggagacggtgagtccacacaggatgtggtctactcaggacacaatctcatctgtgaaaacggaaatgtgcttgccgagtcaaagcgctttacaactgagactatatacagcgagtttgatgtagaaagaatagagactgagaggcgcaggatgacaacatttgttgtcgaggatgatcacagatgggctgagtttgatcttgaggtaaaggataccattcttagccgctatgtaaacccggctccttttgttccggcggacaagacagacagggacagacgctgtgatgagattcttatgattcaggctatggggcttaaaaagagattagagcataccaactgcaagacagcagttatcggtatttcaggaggactagactccacactggcactgcttgtcacggtgagagcatttgaccttttgggaaaggatcacaaggatatagcggcagttactatgccgggctttggaacaacagaccgcacatatgacaatgcggtaaatctcattaaatgccttggagctacatttatcgaggtggatataaaggatgctgtaaatatacatttcagggatatcggacaggatccgtctgtgcatgatgtcacctacgagaatggacaggcacgcgagcgcacacagatacttatggatatcgcaaacaaggaaaacggaatggttataggtacaggagatttgtcagagctggcactcggctgggctacctacaacggagaccatatgtccatgtatgctgtaaatgcatcggttccaaagactctggtgcgccatctggtaaaatactatgcagatacctgtggcagcgatttgctggaaagtacacttcttgatgtgcttgatacacctgtttctcctgagcttttaccacctgaaaacggtaagatttcacagaagacagaggatcttgtgggcccttatgagctgcatgacttcttcctttacaatatgctgcgctgcggctatgctcctgccaaggtttaccgccttgcaaggatagcatttgaaggaaaatatgatgatgagtttattctcaaatggcttaagaacttctatcgcagatttttcgcacagcagttcaagcgctcatgtctgccggatggaccaaaggtaggaacagtggcggtctcaccgagaggagacctaaggatgccttctgatgcgtgcggacgtatctggatggatgaggttgataagctgggataagtaagaggagaacaatgggaaagacacataagaaaactcatagaaggcagggaagcataaaacatgcaaggcgtcgcaacaggcgcatgaagataggcgcaatagtcctttgcgcagcgataatcataacaacatttctggcgtgcggcatgcagcttttggttcctgtagcagactctgtggcaagtgctgataataagacacaatcagggaatgttgatgtgcagaagaataataattcacttaccgcatctaaaatggattcagaaaaaaatcaaaacagctcagaggctgatgtaaacgctgcaaagcaaagcagcgagcctgacaaggaaacgaagcttgatgagatacttcacagtgcaaagtatccggggcagctaaaggagcttgcaaagaaaaatgatgaggcaattgacttcatatatgagtatcctaaggagcattcgaaagagcatgatattgatctgactgcagaggcctcgcaggatacagtacctcttttgcagcagtgggataagagatggggctatgaaaagtacagtggcaattattttgcggcgagtggctgcggtccgactgcactttcgatggttgtattatatctgacacatgatgcacaggcgtcccctcttgcggtggcagagtatgcaaaggaggccggctacagtgtggatggctccggaagtgcatggaatcttataagcaagggctgcaggcactacggggtaaatgcaaagactataaaggtggatgaggatacatttaaagaaaggcttgatgagggcaatctgatagtcgtaaatgtcggtccgggagatttcacagaaaagggacattttatggtgatcacaggctatgatgatgagggctttactataaatgatccaaacagtatcataaagagcaatacccactggcagtttgagaggctgcattcgcagatcagagccgcctggaggatgtttgtgtagataatagcagcaacacatgcatttatgctgatgtttgtgatgcatatggaaaaactaaaaaataagaaataaaaaataaaaaacctgctgtgtcatgcttgtctgacacagcaggttttttgttaaattcatgaataatca

SEQ ID NO: 1536 - DNA, 45179 bp, Unknown
  gut microbiota DNA sequence
aaaataccttttgccccctcatatcattagtatagtgtactaaatctatacagactaataacaaacagtaaagtatggtatgcagattatagcaattgaataccatgctcctcacatgccttaattgtctcctcaggccacagtgagctctgtacctcaccgatatgagcctttctgaggaagaacatacagattcgtgactgtccgattccgcctccgatagtgtacggaagctccttgttgaggatagccttctggaatggaagcttagcacgctcaggacatccggccttgtcaagctgctcctttagggctttttcatctacacgtatacccattgatgaaagctcaagtgcgatatcaagaacaggatagtatacgatgatatcagcgtttaaagcccagtcgtcatagtcaggggcacgtccgtcgtgaggctctccgtttgcaagcttgtcaccaatctgcattacacagattgcaccctttgcctttgcaaaataatactcgcgctcctttggagtattgtccgggaacatttcctcaagctctgatgtggtgataaaggtgatatcctttggcagaattaaatctatgtagtcgtactgtatagccatgtactgctcggtcttgcgcaggcatttgtatactgtctttactgtttccttaaggaagtctaagtttctgtcctccttgcggatgatcttttcccagtcccactggtcaacaaatatagagtggatattgtcagtctcctcatcacgtcttatggcattcatatctgtgtagatgccctcgccgagagaaaagccgtatttctttaatgcatatctcttccacttggcaagagagtgaacgacctcagcctccttgtcaccctgctcaaggatgccgaaggtaacaggtctttcatatccgtttaagttatcgtttaagcctgtggtaggatcaacgaaaagcggtgctgaaacacgtgtcagggaaagacgctgtgcgagcatgccctggaagaaatccttaacagtcttgatggcaagctgtgtatcgtgaagattcagtgccgaagaatagttctttggtattgttaatttgctcattttcgattaaacctcgttgtattattaatttttaaataaaattcctttaacctgattattatatcacaatttttctagaaagatagtccataatatgataaaattagatagtttaaagagaaacaatatcgttttaccttatttttacgtgtttaaggtgttaatgaaaggtagtagatttatatgagaaaaagagatatgacctttgcttcggcggtgcttgaggcaatagacgctattttagctcttgcgtatataggcttacagatttattatggagtgtgctatcacatacaggtatttaagtttgtggccaatatacttgtgcttttgcttgtatacattgcaatcacatggctgcagcattatccggaaaagctcaatcacatagcagcggagctgtgtgtgggcaatatcagaaagtattcactcaggcttttgacgtttgtaaagcttgtttttactgcggggcttttggtgccatgcgtgtgtgatgcgtttggaatagcaatccgcgatgtatacagcctcattatgatagggctcatccttgtagtgtcggcatattatgagtacaggatatttcaggaaataaagtcattgcggaaataatataggagaaataaaatgcagcttagtatagaagaagttaaaaagctggatagtaacagctatcagataatagatataagaagtgaggaagaggtggcgcacggtgccataaagggagcactcaatattcaggcagaggaaatagagtcagatgagagggtggtgcatgataagaagcttgtcatagtctgcagccgtggtaagacgagtgtggacgtggcagagtatctcacagaaaaaggttttgatgcggcaagcttaaagggaggctatataagctggctgcttgatgccatgaaagaggatgaggtggcagagcgcgatataaaggcagatgtggagcaaagcatcagaaagaaatttaagaaatccatctggcgcaagtttacaaaggcgataaacacctatgagcttgtaaaaccgggggataagattgcagtatgtatctcgggaggcaaggattccatgcttatggcaaagctgtttcaggagcttaagcatcacaacaagtttgattttgatgtgaagtttctcgtcatggacccgggctacaatgaggcaaacagacatgtcatagaggaaaactgcaggaaccttggcatccctgccactatttttgagtcagatatatttgatgctgtatatgatatcgaaaaatcgccatgctatttatgtgcgaggatgagaagaggacacctgtatgcatttgcaaaggagctgggctgcaacaaaattgcgctcggacatcactatgatgatgttatcgagacgatactcatgggcatgctctacggtgcacaggtacagaccatgatgcctaagcttcacagcacaaactttgagggcatggagcttatcaggcctctttacctggtcagggaggacgatatcaaggcatggcgtgattacaacggtctgcatttcatacagtgtgcctgcaagtttacagatacctgtaccacctgcaataatgaggaaaaccgctcaaagcgtgttgagataaagcagctcatcgctaatcttaaaaaggtgaatccttttgtcgaggcaaatatatttaagagcgtggagaatgtaaatctggctacggttgtagcatataaaaaggatggcataaagcacagcttcctagagcactatgatgaataagacagatatatttcaggagggcattatatggcagatatcatggattatattgactggcgtggagatataggctttgatgaggtgcatgtaaatgaggtggacggactgattttttcacagcttatttatgtgcagatgaagccatatatgccggatgcaaagaagtcataccttacgataaaacagctttcaagcctttactgcgcggaccacagtgatgatgagattgagcagatgcctaatcttttccgccactccgcgaggctgcttcaaaagctggcgcactcaaggcgctatgctgactgcattttgagatattatatatacgatataagtgaaaaagaggagtcgcagttttctgcggttacgatagaactgcctgacggcacatatttcatttcctacagtggtacagaccattccgtggtcggctggaaggaaaactttaatctaagctatctcgatgagacaccgggacagaacaaggcgaaaaaatatttaaagcaggtggcagcatatatatgcaatgatgataggggcataaatgaaaaagccataaatgataaagccttagatgatgaaaatatcaacaataaaagcatcaatacaggaaagctgtggataggcggacactcaaagggtggaaatctggcagtgtttgccgccatgcatgtggataaagaggtgcaggatgtcattattaaggtgtttaattttgacgggccgggcttcaatcacaagatgatatatacggcaggctacaaaagaatttttgacagaatagagacatttctgccgcagtcgtctattgttggcttattgcttgagcatgtggacaattatgaggtggtaagaagccgtaattcggggccgctgcagcatgatgctttttcatgggagataatgggcggaagtatcataaaggcggatgggctggacaaaaacagtgtgcgccttgacaagacactcagaaactggataggcagcatggatgaggcgcagcgaaagcagtttgtaaatgtgcttttttcaatagcatcggactccaattttgagaaccttgaccagatgtcatttaagcagctcattgagatgataaaggctgccgatgagctgtcaaaggctgactggagtatgcttaaggatacagtaagactcctgatttctgccggtgtcggcgtggtcagggatgaaaaggagaaataaatgttaaatcagttttcaagaacacagcttttgcttggaaaagaggcgatgcataggctaaagggcgcaagagtcgcagtatttggaataggaggagtgggcggatatgtctgcgaggcactagtaagaagcggcgtgggagcgattgaccttatcgatgatgacaaggtgtgtcttacaaatctaaacaggcagataatcgcaacccgaaagaccataggaaaatacaagacagatgtgatggaggagaggattcatgatattaatcctgatgtcagtgtcgtgacgcacaggtgcttctttttgccggaaaatgctgatgaatttccgtttgaagagtatgattatatagttgacgcggttgatacggtcacagcaaagattgcgcttgtcatgaaggcacaggagaaaaatgtccctatcataagcagtatgggagcgggaaataagctggatgcaagtgcatttaaggtggctgatatatataagaccagcatgtgtcctcttgcaaaggtcatgcgccgtgagcttaaaaaacgtggcgtgaaaaagctcaaggtggtatactctgaggagaagcctacaagaccgatagaggatatgtctataagctgcagaaccaactgcatctgcccgccgggtgccgaacacaagtgcacagagcgcagggatattcccggaagccttgcatttgtaccatcagtggcaggacttatcatcgcgggcgaggtggtacaggacatagcctttgacagggtatgatgaagaatacaattacgaaaagagaggaataaaaatgccagtatttgattttagcgatacaccggtagcaaacgagcatccggagtgtacatatgagacatttcattcgacagagaccaaggcatcggccgataaaccgattgttgtgatagacaataagcaaaaggaatgggcgcatcatgcgctcggtatgtttacaaatccgataaagcgtacatcctttgaatttgaggatggtgacggggtaatcagtgcagatatcctgcgcattgattcccgcttcgttagcctttttaagtggcttggcgaaaatcacataaaggtacagctttcaggagccaatacacctgacggatacgcagtatacagggtgagggaggtggctctcggcagaggcacaaagctgtctgcagaggacggattcctgcagtatatgatggaaaggctctttgccagcaccatgcctgaggatgaacctgacctcgatgattacgaggaagagggtgacagcatgaagctcaccagtatacagagcatcacagatttcatgacctgtgcaggccgtacactgcctgacaatatactgctgtgggccagaagaaatctggcagttgcgcgttcaagcgaggtatcacctgaggagagacgccatgcgcagagagcactttccatcatgatgaatatccagtggaagggaaattactttgaggcaattgaccctgtggaggcaaggcgcatactcgatgaggagctctatggcatggagagcgtgaagcagagaatcattgagaccattatccagataaacaggactcatacacttcctgcctacggactgctgctctgtggaccggcaggaaccggaaagtcacagattgcatatgctgttgcacgaatactcaagcttccatggaccacactcgatatgagctcaataaatgatgcagagcagctcacaggaagctcaagaatctattcaaacgcaaagccgggaatcattatggaggcattttcacaggcgggagagtcgaatcttgtatttatcatcaatgagctcgacaaggcctcaagcaaaaacggcaacggaaatccggcagatgtgcttttgacgctgcttgataatctgggctttacagacaactatatggagtgtatggtgccgaccgtcggagtatatccgatcgcaacagccaatgataaatcccagatttctgcaccgcttatgtcacgttttgcggtgattgatattccggactataccgatgaagagaagaaggtcatcttccagagatttgccctgcgcaaggtatttgagcgaatgggaatgaaggaggaggagtgcgttctcacagaggacggacttgatgcagtgattaagcttcacgagaacacatcgggcataagagatctcgagcaggctgcagagcatctggcagcaaatgcactttatcagatagaggttgataaggtaaagcaggtggtatttgacgctgaggctgtttttgagcttttaggctagcaggatatgattacggatacaggaattgttacgaaaataaaaggagattgtcaggatgagagaatttggaaaatccagaaaattagataatgtgctttatgatgtaagaggaccggtggtggatgaggcggcccgcatggaggaaaacggcacaaatgtgttgaagctcaatataggaaatccggcgccgtttggcttcaggacacctgatgaggtgatatatgatatgtctcgccagctcacggactgtgaggggtattccaactccaagggacttttttctgcaagaaaagcaatcatgcaatatgcacagctcaaaaagcttcctaatgtgacggttgaggatatctacaccggaaacggagtcagcgagcttataaacttaagcatgtcagcgcttcttgacaatggtgatgaggtgctggtgccggcaccggactatccgctttggacagcctgcgttacacttgcgggaggcacggcagtgcactatatctgtgatgagcagtcagagtggtatccggacatagaggatatcaaaaagaagattacagacaagacaaaggcgatcgtaataataaaccctaataaccctacaggagcgctctatccaagggaggtgctgcagcagatagttgatgtggcaagagagcacgagctcatgattttttcggatgagatatatgacaggcttgtgatggatgactatgagcatgtgtctattgcgtcgcttgcaccggacctcttctgtgtgaccttcagcggtctttctaagtcacatatgatagcaggctatcgtatcggatggatggttttaagcggcaacaaggcgctcggaaaggactatattgagggtctcaacatgctctcaaacatgcgtctttgctcgaatgttccggcgcagtcgatagtgcagacggcattaggcggatatcagagtgtaggcgagtatattgtgccgggcggacgaatctatgagcagagagagtacgtctacaaggcattaaacgatataccgggaatttcggcagtaaagccaaaggcagcattttacatattcccaaagattgatactgcaaggttcaacatcacaaacgatgaacagtttgcactcgatctgcttcgtgagaagaagatactcataatccacggcggcggcttcaactgggataagccggatcacttcagagtggtatatctgcctcgaacagagatattaaaggatgccacaggcaagcttgcagactttttgtcttcatataagcagaaataattattggcatagataattataaaacatatgatataaaacatataatatataacatataatatataagctccggcacagaaaattttttgttctgaccggagtttttatattatgctgtaatattttttaaaagtaacctacctgtaactttacataatgtattatacacttgtatcgcggggcggctgcactttaaaggacagaccgcacagcactcaaaaatgtatagagaagaaaaggagaattaaatggaactgcttagagtagaacacttatcaaaaatatatggagccggagaaaatcaggtcaaggctttggacgatgtgtcattgagcgtggaaaagggagagtttgtggcaatagtcggggcgagcggctccggaaaatccacactgcttcatctgctcggaggtgttgacagaccaacaagcggaaaggtgtatataaacggcactgatatttttgcaatgaatgatgatgagcttgccatattcagaagaagacaggtaggcatcatttatcagttttataatctgatacctatattaaatgtggaggaaaacatggcaatcccgatggagcttgatggaagaaaggtggaaaaagcacagatggatgacatgcttttgcgccttggacttacagagagacgtactcatctgccaaatgagctttcaggtggacagcagcagcgcacatctataggaagagccctgattacgagaccatctatagtgctagcggatgagccgaccggaaacctggataccaaagccagcaacgagattatgcatctcttaaagacctcaaaccgcgagctcaaccagacaattattatgattacacacaatatggagcttgcaaaggcggctgaccgcacaataatgatagaggatggtaaaatcagatgaatttgatgaagacactcacattaaaaaacttaaagctcaacaggaaaagaactattgtcacgatagtcggaataattcttgcaacagcgcttttgtcggcgcttgtcacacttgtgtcaagctttcagtacagtatgattgaataccagaagcaaaaaggcggcgactttcatgtgaaattttcgaatgtgaaaatgtctgagctttctgagtttaaaaacaacagaaatattgaaagcacatttgagacaatgggaatgggctttgcaaagctagacggctgcaagaatgaggataagccgtatgcatatgtcatggcaacagatgaggccggctttgagagaggctgctttaaacttatagaggggcgcatggcaaaaaatgaggatgagatagtcattccaaggcacttaaagacaaacggacgaatcgacataaaggtgggagatgagataacactggatgtcggaaagcgatatgattcaaacaccgaaggtgtcatatcggaaaacagcgcatatgagaatgaggcagagacacttaccgatactgtgacaaagcactacaaggtggtaggcatcatggaaagaccgggctatggaatggaggactatagtgccgccggatatacatttgtcacatactctgatgaactggcagcaattgataacggcacaaagagtgaggcaagcgaagctgacactacactcacagtgtacagcagatacactaaaaaggctttaagaaacaaggatgctgtgactgctgatataattggtgtggatgaaaagctgtttgagaaagcaaataaatcatctgttgaaatgtctgctgaggagagtgacaggtttcttaaagagatggaaaatgcaaaatatgatatatatatgaatggataccttataagctatgagtgcgttttcccgattgacggttcatttaaagcactgtttacagtggccgctgttgtggctttgataatcatactgacatcagtgtactgtatcaaaaacagcttcaacatatcaatcactgaaaaaatcaggcagtatggcatgcttgcaagcgtgggtgctacgaggcgccagataaaaagcagcgttaagacagaggcagcaatgcttggagtggttggtattcctgtaggtaccatgagtggtattttggcatcgcttatacttgtcaaggtggtaaatgcgctgtcagcaggctggcttaactttgctttgagctttcatacttccctgcctgcacttattcttgctgtgataatgagtatagcaaccatttatttctcagcaacaggcagtgcaagaagggcggcaaaggtcacaccgcttgaagcaataagaaacacaaaggagattaaaataaagtcagcaaagcttaagaccccggcgattataggcagaatctggggtatcggaggcgttatctcatataagaatataaagaggaacaataaaaagtacagaaccacagtgacatctattgtcatctgctcagtaacctttattgtgatatcatactttatgtctatggcctttagcagggttgggatgtcatatgcttcaacagattacaatatcggaataaatatgtcatgtaaaaaggaccttgatattgaaaagctctctaagcttttgagtggcattgaaggagctgaggattatctggttggagcaggctatgatttcgatgtcagtaagccggagtatacaaaggaatatggagagtattgcgggcagctttatgatgacagtgaggatgtctcacaagagtttttaatcacagttttggatgacaaatcgtatgataagtatgcgtccgacgcaggcataaaaaatgcagctgcaggagcaattcttgtgaataaaggcacatttgatgtgtataatgagaatagctcaaaatacgtcaaaaaagagatggagctgtacaaatataaagcaggagatacaatcgagtgtggctataatgtttatgatgatgcttcttctgatgacaatgcagcagaaggcgatactgaaagcagcacagatgataataatgcagtggaaggtgatactgaaagcggcacagaggataacagtggatacgttgacgaggaaacaataaataacggagtcagaaagactgtggatgtaactattgcaggtgtcacagacaaggtaccaacaggttataagggctacggcaataccacgcttttgtttatgaaccaaaaaggctttgaaagcctatgggctgacggcaagaacggtaatgagattaaaccgggacatgcgtcatattcggcatatgtggttgcagaaaatgcagatgaatatcaggatacattcgaaaaggagacggaaggaaatactgagtattcgcagattagtttttatgtcagcaatctggataaggagatgcgcgatgaaaagtcactctttacactgcttggagtatttgcatacggacttattgtggtcattgccttaataggaatcacaaatatcatcaataccttaagcaccggaatggagcttagaagccgcgagtttgccacattaagaagcattggaatgacagataagcagtttgccggaatggtcaggctcgagagtgtgtttatatctgtaaaggcacttgtaataggtgtaccgcttggtattttaataagctatctcttatgtgttatgatgaacaggatggatgacgcaatcatttatgagccgccgtataaagcaattatattgtgtatagtggttgtaataatgctgatttatgctatcatgaaactatcaatgacgaagcttagacacaataacattattgagacaatcaagaatgaaaatctgtaggaaatgcgggagctgatatgaaaaaaatacttctcatagaggacaataaaggaataacagagggactgtgtgatacctttacagaacctgaatatgagcttttgacagcaggcagtttaaaggaggctggggcgcttttgagtgagcaccccggccttgtgctgcttgatgtgtcgcttccggatgggaacggctttgatttttacagcgaaaggctggaaaaagaaaaaacaccggtgatttttcttaccgcaagggatgaggaaaatgatatagtaaagggacttgagcttggagcggaggattacatcacaaagcctttttcagtaagagagcttgtggcgagagtaaaccgcgtatttttacgaaggaaaagtgatgacagctcatctgtcatacacgcaggaagcataagctatgatttggacaaaaaggaagcaagaagggctggacaggtgattgctctttcaagtcttgaaaaccgtatacttgatctgctttttaccaatcacgacaaggctgtgtccagaaatgccgtgcttgactgcatctgggaggcgacaggcaacgatgtgtatgaccatacagtgactgtctatatgaagcgcatcagggcaaagcttggtgaggatgtgataaagactgtgaagggaatcgggtatcgtgttgattcagatgaagctctttaaacagtatcggctgacagagacagttcccgggggaaagcatgagaaagaagaaatataatttagagaacagaaaacattttgtgtattttgcaataatatatacatgtatatgtgtgatggttatggcttttaccgtcttttttcagtacagggcatatacgaaaaactataacatcacagtggctaagctatgtgcactcattcatgaaaaatatcccgatgtatcagatggcagtatagccgcgattctaaatgacagcagcttaggcagcgattatacaaatttaaaaagcgcagagacgctcttaaaaaaatacggcattgatatggaaaaggattctgcggttttgtcaaatgaaaaagcgcttaaaggggcgctttggctagacatatttcttgttgtgctttttgcagggggcttttgcctttacattgtgcttataagatttagctttaaaagacaggtcagacaggctgcggattatctgcgtcgcataaatcagggagactacagacttgttatggcagatagcacagagggagagatttctatacttaagggagagctttacaagacagcaatctatttgagggagtctgcggaaaatgcaaaggcagacaagcttttgctaaaggatgcgctttctgacatatcgcatcagcttaagacaccgctcacatcactttcgataaatctggaaaatctggaaggaaatcctgatatggcacctgaaaacagaagcaggataatgcgcagggcaaagcgtgatgtggataatatatcgcatatggtgcaggctatcttaaagctttcaaggcttgaagcggatgttgtggagtttgatgagaaggatacgctgctgtctgaaattgtgtctgaggcagctgacaatgttatggcactttgcgatttgagagacataaggctgtccatagatgaaggctctgataaggatgcctgtatacatgctgatgcatactggcagtgtgaggccattacaaacatagtaaaaaatgcagtggagcacgcagagagtgaggtaaggataggcttttacaggtatgagatgtatgcagagataacagtgcaaaacgatggagagaccataagtgatgaggacaaaaagcatatttttacgcgtttttacagcggcagcggacagccggcagacagcatcggcataggactttcgctcgcggaagcaattgtgcgtcatgacaatggatatatccttgtggaggattgtaaaaaagatgtattaaatgaaaaaaatgaatgcagtggcacacgctttgtggtaagatatttgtgataagttgagaaaaattatcaataaatacactaggaagcgataaaatgacactaaaagaacttggcataggacagagtgccagaatacttacagtaggcggtgagggcgcactgcgccagcatttcctggatatgggagtaatcccaaaggccgaagtaacagttatcaaatttgcaccgatgggagacccgatggagcttcaggtgcatggctatgagctcacattgaggcttgatgatgcggcacagattgaggtagaattaattgatagccgttcaagaaagcatgagggtcctaaaaagataagcaacacagcccatcccggacttggcgaggagggcaaataccatgtgaagggcagtggcaatccccttccggatggtgagaagctcacatacgcacttgtgggaaaccaaaactgcggcaagacaacacttttcaaccagcttacaggctcaaaccagcatgtgggcaatttcccgggagtgacggtggacagaaaggatggctctattaaagaacatccggatacatcaatcacagatttaccgggcatttactcaatgagcccatatacgaatgaggagattgtgtcgagaaactttgtgctcgataacaagccaaaggccataataaatatcgtagatgcgacaaatatcgagagaaacctgtatctgaccatgcagcttcttgagatggatataccgatggttatcgctctaaatatgatggatgaggtgacggcaaactcaggctcaatcgatgtaaataaaatcgagggactgttaggagtgcctgttgtaccgatttcagccgcgaagaatcagggtgttgatgagctggtgcgccatgcgatacacattgcaaagtatcaggagcgcccaggcagacaggatttctgtgatgagaatgattttggcggtgccgtgcacagatgtatacacgcggtcagccacctgattgaggatcatgcaaagctcgccggagttccgattcgctttgctgctaccaaaattatcgagggagatgcacttatattagagcagcttcatcttgatgagaatgagaaagaggcaatagagcatctgattgtccagatggagaaggagcgaggccttgacagaagcgctgcaattgcggatatgcgctttacatttattgagaaaatatgcgagagcaccgtggtaaaaccgaaggagagcagggagcgtatcagaagtgaacgcatcgaccgtgttcttacaggcaaatacacggcaataccatgctttatagtgataatgcttgctgtattttatctcaccttcaacgtaatcggagcaggacttcagtggcttttggagcagggcataggagcactgaccgcgcttacggataaggcactcacagcggcaggcgtgaatgaggtgctgcacggactggtaatagacggcatctttcagggtgtcggaagcgtattaagctttttgccgattatcgtgacactgttctttttcttatccctcatggaggacagcggatacatagcgagggttgcattcttcatggacaagctccttcgtaagataggactttccggacgaagcatagtaccaatgctcataggcttcggctgtacggtgccagctgtcatggcgacacgtacactgccaagtgagagagaccgtagaatgactatactcctcacaccgtttatgagctgttcggccaaattgccaatttatgcattctttgttagtgcatttttcccgaagcatggcggacttgtcatgggaggactgtacttccttggcataattgtcggaatacttttcgcatttatttacagaaagactttgttcaggggtgacgcagtgccatttgtcatggaactgccaaactacaggatgccgggcgccaagaatgtgtgccagctcctctgggagaaggcaaaggactttttgcagaaggcatttacagtaatacttattgcaacaatgctgatatggttattacagagctttgacatacactttaacatggtaacagattcaaaggacagcatgcttgccgctatttcaagtgttatcgtgcctgtctttaagcctctgggactcggcgactggcgtatatgcacgtcacttatcagcggactcatggcaaaggagagcgtggtatcaacacttgagatactgtttggcggaacggttacgacagcactcacaacactttcagctgcatctcttctggtgttctcgctgctctacagtccttgcgtggctgctatagcatccataaagagagagcttggtgcaaagtgggcagtcagcgtggtgcttttgcagtgtgcgattgcatgggtggcagcatttattgtaagggtaattggactgcttgtgatgtaaaaaaactgactacaaaaaatataaaaggagatatgtgatggagattaaactggaaaatgaatcacttgagctcacgataaacagcttcggagcagagcttaaaagcatcaccggcaaggaaactggtacacagtatctgtgggatgccgatgagaaatactggaagagaagcgcaccggtgcttttcccgtttgtcggcagcttaaaggacaagaagtttaccgttgatgggacagattatccgatgggacagcacggctttgcaagggatatggagtttgagcttgtgtcacagacaaaggatgaggcatggttttcacttaaatcaaatgatgagactcttgcaaaatatccgtttgagtttgtgctcgaaatcggctataagctctcaggcagtgagataaaagtgacctggagggtgactaatcctgcgaaaaaggatttacttttctcaataggtggtcatccggcatttatgtgtccggtcgcagagcagggaaagcagtcagactattatctgaagcttgacacagacaaagcaatcacctacggacttatctgtgacggaggacttttagacaaggatgacaatctgcttaaggtggatgaggatggatactgtcagatagatgagcatatgtttgataaggatgcgctcataatagaaaacagacaggcttcaaaggtgagcctgtgtacaccggataagaagccataccttacggtgtcatttgatgcgcctttatttggtctgtggtcaccggcaggaatgggagcaccgtttatctgtattgagccgtggtacggccgatgtgacagagcaggctttgccggagaattaaaggacagggagtatggtaattcactggcacagggtgagaaatttgagaagtcatatacgattgtaattgagctgtagattttcttgttctcaatgtgacttaagacttaaatagttacaaacaaaaatataagatatagttagaatcatgggactgcgatatattgtagtcccatgatttttgtattgacaaaatgcaagatatgaaatatattatacttaactagtgactaataaacagtagagtgttaatcagtagagagggtgttataatgcaaaagcaaaattcaaaaaagaaatttttggagaaactttatattagcttatcattttattttggggatgatgactgtgatagtttaattaaagactatgaagaatggttcgaaaatgaagaaatggctgaaaaaagcgagtacgaaatatgttccggcttaggaaaaccgtttgatatcgcgagaaatttatacaaagattcaaaagaaggaaaagagcatacgtttccattgaagagtagtgttttattacagacaattgccacgctggttatatattatgtgctatgcgtcagtttgttaagatactttgataaaaacggctggaatttttatccggttgctttgatagctaatgttctagtatttgttgcaggtttgtttattcttaaaaaatcaaaattaacatgtgatatgcaatttaaaaaccatctgttattaatcggattattcttttttattttattaacagaagtatttctggtaatgaaaaagaatgaggctggcttagggagttattatgtggtattagttacaacagctataattattctgagttgtattattatttacatcatcttaaagaaatatataataaacagggaattgggttttataacgatatttcatatacttggtattattacctgtttaatgtattttataaatcagttacatatgttttatatagaaagaacgtttgggcttgaaaaaataatagcatatagtagtttattatatattcagacgctgatttttgggacaattttattgttaaaattaaaatttgagaggaaatcataaatggattcacagctaaaaagaggaatcttaaatatatgtattttacagcttttaaaacaagaagacagatatggatacgatataattaaaatattgcagggacttttcccggatacagatgaaagcactatttatgccattctaagaagactgaataaaggagggttgacggaagtatattacagtgaaaaatcattgggaccacagagaaaatattataaaatagtagaaaagggggaattatatttaaaagaaaacatagcttcctggaatgagatagtaaggatttttcacgaacttgaaataatgtaattgatggaacatttaaaattacttgttcagatgaaggaacaataagcgataataattaactatacatgtatttgaaaagcaggtgcatcggcatatatagcataacgctatatgtgccttggtgcacctgcctttttcatgcctgcctgaagcagccatttctgatcaattttcttaagatcttcaccgaatctgacatgcagccgaactgagccttcgagctgctcgatatgttcaatggtgcccttgccgaactttggatgattgatatcgtcattgatattaaattttacagtactgtttttctttttgcggtattcctgctcgcgtgaatatgtgtcgcggataggaatactcttgtcagtaattttctttttgagaaccttatcataatcgtgcttaataagtccttcaccggctttgtagtaaggagtgggagctgctccgataagtgagcagcaatatttccacgcacttccgtggatgccgggctgccagttgtacttgtccggtatatccatattatattgcatatagtgggcatattcgtgcttatataaatccatcctgtcatcctttgacaagggctttgtcacacagtagccgatgaaaagcagcgaaaaatgaaattcttcttcatcctgcccaaagcccggagtgtatgcaccgagcctgtcagtatcaaagccaaaggtgataggaacccttgcaccgttaagcccaagctgtctgtcgagcttctggtagagaaagcggatttccgcgagatgtatttttgtttcgttttcgagtaggtgttgtaaattgttgtctatgttcataagtatatttctctaaaaaatcagtttgttttcaacacagtaatgatatattccgtcatcctcaaccgatttgcatacaaaatcagccttagccttgacttcgtcctttgcattgcccatggcaacacccatacctacggcctcaagcatttcaatatcgttatgtccgtcaccgaaagcaattgcttcatcctttgagaagccataatgcctaagcactgcagcaacagcattgcctttgccactgttaagcggaataatatcagcggccttatcccaccatgcagttatctgtgagtggggcgcgccggatagaatctgtgagtgctcatcttttttgcaggagcacataatctgatatatatcagtcctgcttatctcgtcaaaattgtcagcaattttaagcttttcactgccgaaggcaaagtactgctctaaatcagggtcggtaccgtttgtgacaatcatatgctcgttgctgattgcaatggcgcggttcatctgctttagattggaaattatctgatatttgtcgtgctcattaataggatttttgaagatgatatcattgcctttggtgacgaatgagccgttaaaggtgagcaggacatcaaaatcaattccatcaaaatgaggcacacctgtgtagcttcttccggtagccatacaaaggatgatgccattttggtggagctgcctaagtgcagcagcagtgtttgctgataattctttatgtcccagccgaagcagggtgccatccacatcaaagaatgctattttaatcataattcacctgcctgttttaatgctagtttaatgatattttcatttatatagaatccgtttgattgaattttggttattgcattttttacagaagaaataatccctgattgtttagcttttataagaacacctaaggtgcccgttactgttaatccaagatattttgctgttttttttgctgcattatcatcgatgataactaagtctgctttggggtcagcttgtgccaatatcataacatcaacttcaccggcatgaagctttgctttgtacattttgcggtcttcaatgttagtgattgtttcgactgtaatccaatcaagattttgtttgatttgtaaacaggcagaatccttttttgctgtaacttcgtcgaatactgctttaggaataatgattgaaccatatattttttttaaaatgttaagtaagtctgcattgcacaatgcaattaatggtgttgaattgacaattaccctacgcattattcatctcctctataaattctgcttcatcatcaaaactgaagatagatatattattattgcctagatatttgatgaaatcttcctcactcattccggctatctgtgcacaatatccaatagaaatatggttttttaaataaagcattagagcagtagctttcttggcaaaagcattagcttcatctttggtcattttggtatcgtataatacttcatctggtatttttattgcaatactacacatataaacacctctttctatttataatgaatcattaattatatctcagttacatgataacataataagcgcaagattaaaaacatttatttaaatttctgtcacaacgtaaggtacgtaagccggggactgttggggacacgcgctttagctatcgctacgcttagcaactaagattctgtacgaaattatgctcatgaagcgtagaaacgcacctgcatggacgcaggggagaggaagatttacatatgtgtacgcaggaggacctggttcataaagattaccatttcttataactgtgttcttgatattaaaggacacaagtggcttttttcaatatgttgttgttaatttatggtgttgggcttccaccattatgccagaagcctcacaaaaagtagctgaaactgcagaaatcaccaaaacagcaccccaaacccagcccaaaagccggaaaagacccggcaaaaagtagctgaaactgcagaaatcaccaaaacagcaccccaaacccagcccaaaagccggaaaaaacccgagaaaaagtagttgaaactgcagaaatcaccaaaacagcacccaaacccagccagaaagccggaaaagacctggcaaaaagtagttgaaactgcagaaatcaccaaaacagcacccaaatccagccgtaaagcctcataaaaatggacttatagacatgtattgatggcttagtcgagaattaactactgtggagtgtactagaacttgtgagtagcgtgtcatttgtaaccgccaaagcgtacacaatgaagtagtaactataaactgtgagattatagcaaaccatctagcatatacatttgtataagtttcgacggtttcgtcgtgcatagaaaacctaagagcataatttcgtacagaatcttagtcgcgaagcgtagcgagggcgaaagtgcgtgtctccccaacagtccccggcttacgtaccgacctgcgactaatgcgcaaaagttgcgcatgaaaagcgcgcacctaattccttgtttgtgaaaaatgcttgaaaacaaaagttaaaaaatgtcgaaattgcacattgacataattataatactgtaatatactaagttcagaacaagcggttgcgcgaaaaacgcacctaagaaataaattaaattacaagcaaatggaggaaacaacggatggacaaatttattgttaacatcattcaccgccctgagatggtgcctgagtactcagcaacagtgacaggacagggaaaagaagaggatattggagataagaagcttatcacagagtcactcgacatcttcaagacacagcagagacttgcacatgaggcgggactcaaaactacaatccagatgacatatgcttcactttttaatgatgaggcagtagagcttgcaaagcaggatcacgagaaatacggtgatgagatagcactttcactccttggacttccatgtgaggagtttagagagaagtataagacaaaggatttctgtatctggatgttctcaatggaggacaagaaagctatcgtaaacgatgttttcgagaaattccatgacagattcggtttctatcctgagtcaacaggctcatactatatggatgcagaccttacaaactacatcaaagaaaaatacccaatggtaaaatgtgcagttgcaacatgctgggaggagggacctaaggcataccacacatgtaacaactcatggtacacactcttcgacggaggcccatgggcaccatggattccatcaaagcagaacacacatgcgccggcagcaaataaggaagaggatagcggaatcgtagcaattccacatctctcacgtgaccttattgcatgctatgacggaaacggctcaaacttcggaacacatccacagaacgtgcttcgtggaatgatttatgatacaaagacatgggagtatccatatctttacaacctcatcgaccagtacagagaccttgcaaaatacaataacggatattcatataacatgatgttcgtaggacctggctggatgaacaagatgggacgctgggagcagccatatgagcttctcttaaagtcatacacagacggctgtaattactatggcaagttaaagaaagagggtaagctcatcgacatgacaatgtcagagttcgctgattacttcagagagaagaagggtgtcaacgcaggtaactacaatgagcctgagtgtgcaccatggagagatatcctttacggctcagacaagcagctcttctggtactgtgacccatacatgagagcatgcgtaaacatggatcagggtggagcaatcgtagaccttcgtccatacgttgcaaagcttgagtggccggtaggaatcggaacaaagcatgtacaggatgcatcttatccattccttattcaggaaaaatacagagcaggatactttacacactatgcaggagcaggaacagtaagaagtgccaagctttcacacaacggtgaggaggttgacctgtgtctctgtcctacacacagccatttttcagaggaagttattgatggcaagaagacaagaatccttacacttgatcctgtagatattgagttttatgatgttaagcttactcttcagacaaaggaatactttgaggagggctcatcaaacatcaagattgagcgtaatatccttagcatgagtgatccaaatgcagaggtttatctcgatgagtacatcacagcatgctacggaacaacagagtatcctgaggatatgacaggcatcacacttacatgtgagggagaaaacccacagagcatcaattatgagtacaagtgtcgtgatgcaaaggttgacggagcaactgcagtaagcgcagtaattcctgcaattcagacaaaggtttcgctcacaccatctgcaaaggcagagggatacattgaggaaggatatgcattctctccaatgttcaagcttggttacaagaaacagattaaagacaaggaggtatttgcaacatggctcaacttggaaaaggcaaattaaactacagatgtcctatatgttttatgagggatctcgatattgatatgttctataataaggaaacaggtatttatagctgcatccgctgtcagttcagaggtacagaggaagaggtacttcagggcaacgaggatgtccgcaagaagtacaaggctatgtacaagagattcgacaagttcgattttgattaaagtagtgattggtacgctgctgctataatagcagcagcgtgttttgcatttcgctacaaaggagagtatatatggcgaaaagaaaaaaagacacgatggaattcagattctatgagttgccacagggagagtcggcactcgtactgtgcggagaatcctggaagagagtgtatggtcatgaggaatttcacctgcatttccataatctgcttgaaatcggcatctgccgcgagggagatggaaatatgtatctggatgaggatatttaccagtatcatgacggcgatatcacatttatacctgagaattttccacatgttacagtcagctatggtgaggtggtgaatttctgggagtacatttttattgacatacattctgtgatagaagagatgttcccaaacaatacggcattccagaatgaggcagttacgactatatcaaaaaaagcgtttatgactaacgtgtatcagagcccggctatggctgagtatataaatgccataatcagggaaacccgtgaacataagatttattgccaaaggacggtaaagctccttgtgcagggaattgtaatagagctgttgcgtaggtatgatgagcttccggaggaggataataatatcgtaaagggtaccaatatgtcacagatagccacagcacttgactacatgaataagcattacagcgaatcgataaaggcaggggagctttcggaactatgcaacatgagcgagactcatttcaggagactgtttgaatcatacatcaatatgccgcctatggagtatctgaatctgataagagtacagaaggcgtgcgagcttatgaaaaaaacaaatgagcctatggagcttattgcacaaaagtgtggattcacaacccagtcaacttttaaccgtaatttccgcaaatttttggacacttcgccatatcagtggaagataaatcctgaaaattatgagcataagctgctgaattttaggatatctgcactaaagggatggtagaaaatgcatgtttcgtataattttgtacatttatgattgaatatgcatgtaattgtgtggaatttgttaacacataaatagcatgtatggttataatgactatgtaatcaagaaacggataaacattaatagtcaaaatgcccaattaaaacaatatgactatgaatgaattatgaacggagtattacaaaaacatcatttttattagggaggaagaaaaatgaaaaagaaagtagtttcattattactcgtaacaacaatggttgcctcacttgcagccggatgtggagattcatcttcatcaggagatggcacagaaaagacaggcaagaaggtagagaccgtagatgacggtcatacacttacagcatgggcctgggatgcaaacttcaatatcccggcactcaaagcagcagcagaggattacaagaaaaatgtagatcctgattttgtactcaatattgaggagcagtcacagtcatctgatattgagacagcaattacaacagcaggttcagcaggagattacagtacacttcctgacatcgtattattccaggatcactacttccggcagtaccatacaaattatcctgatgcatgggtatcagcaaatgatgcagatgttaagtgggatgatttcagccaggagaaattatcattctctacaatcgacggagagcactttggattccctgttgataacggaacagttatctttgcttacagaacagatcttcttgagcaggcaggatacacaatcgatgatatgacaggtatttcttggaaggatttcatcgaggtaggtaagaaagtatacgagaagacaggaaaatacttactttgcatggacggcgacggaaatgatttattctacatgatgcttcaggcagagggtgagtcacagtttaaggatggcaagccaaactttgtagacaacgctaaattaaaagaaatcatgcaggtacttaaggatatgatcgacaacaatgttctttaccttgcaaataactggtcagattacacagatcaggctgtccagggagacatggttgcaggcgttatgaacggaaactggatcattcctacaatcgagaaggttacagacaacagtggaaagtgggagattacatctcttccaacacttgagggtggtgaaggctatgcatcaaacggtggttcttcactttacatcacaagcaactgcaagcagacagaccttgctaagaaattcttagcatatacattcggtggcggatcttatacagacaagggtgtatctgagacatatgacaatgctcttaagaatggtggtgttatcactacatatacacctgcaggcaagtctgaggtttacaacgagggcgttgagtacttcaacaaccagccaatttacgctaagatcgttgagatgggtgcaaatgttaagacaatcgagcagagcgatttccattacgatgcacgtaagaagcttgctacagcacttatcaatattactcagaacggtgcagatatcgattcagagataaagacagcagaggatgaccttaaattcacaatgggactttaatctgttagcttgatggcaaatgtacagggagccattaaatggctccctgttttttctcaaagacgtatagttaggaggcctttacagtgaagaataagaaaaaaggaatgagcataaccggtaaacaaagggctgccggctggatttatctgactccggctacaatactcattttcataatgagcttctggcctataatccaggctgttattacatcatttaaaaccggttcaagtgcaaatatgcagtgggctaatccatttgcctacaattacacaagaatgtttcaggatgcggtttttaagagatctatcggaaacacattcctatatttaattatcgaagtgccaatcatgcttgtactggcaattttactggcacagttacttaacaacaagcatcttaaatttaaaggacttttccgtacatgtgtatttttaccatgtgcaacatcactcgtatcatatgcattgatttttaaatcgctttttgcaacacagggacttatcaatacaatccttgttaaacttggaatattagagagcaactttaacttcctcggtacaggctggagcgctaagattattatcatagtagctcttatctggagatggacaggatataatatggtgttctttttagctggtctgcagaatatcgagtattctgtttacgaggcggcaaagatagatggagcgagcggctggaggaccttctggtctatcacggttcctcttcttagacctacaattgttatgacaaccatcatgtcaataaacggtactttacagctcttcgatgagtctgtaaacctgacaaagggtggacctgcaaatgcgacaatcaccatgtcacattatatctataacggctcgtttggtgaaggtgttgcaaactttggatatgcatcagcaatgtctgttatcgtattcatcatggttgctatactggcatttatcaatctgaaagtaggtgacaagcgtgactaagaaaaaacatggatcatcaatacaaaaaaggcttataccttcatacatttttcttgtaatagtttcgttcatctcagtatttccgtttttctggatgatatcggcagcgaccaacaagtctattgacgttgcaagaggtagaattgcatttggtggctatgccattgagaacttaaagaaactgtttgcatcacagaacgttgcacttggaatgaaaaactcacttatcaatgcaacagttcagacaattatagcactgcttgtctgctcacttgccggttacggctttgagctctatcatgacaaggcaaaggataagctgttctcagttttacttcttgccatgatgattccgcaggtagctacacttattcctctgttcaagatgatgtcaaagctcggctttataaatacggtatggggcttcatgctcccagctatttcaacgccgttccttatcatgatgttcagacagaattcgagaaacttcccagtcgatataatggaggcggcacgaattgacggactcagcgagattggtattttcttcaagatgtatatgcctgtacagaaatcaacatatgcagcagctgcagttatcacattcatgaatgcatggaactcatacctgtggccaaaggtaatcctcaataagcctgatgctatcacaatgccaatgcttattgcaaacctcgcagcaggatatacagtagattacggtgtactgatgatgggcgttcttttctgctccatccctacaatgatcgtattctttgtactccagaagcagtttgcagagggaattacaggatctgttaaataaaagtaagataatattgttaaaaatcaagaaggcaaataatgtttattatttgccttcgtcttataagaggctttgtgtttaaaacagacatgtatcaaataataaatacagtagataggagtgtaaaaaatatgagtaattttgattcaaatatcattaagaatccggaaatatttgagcagaacagacttgcggctcattcggatcatgtgtgctataaaaatgaactggagaaaattaaaggaaaatcaagcctgagatatgatatgaacggcttatggaagtttgcatatgcaaagaatcagtccctggctccttgtggctttgaggcagctgactataattgcaaaggctgggatgagatcagggttccggcacatattcagatggaaggctatgacgtgccaatctatacgaataccacatatccgtgggaggctgatgagtttatcaagccgggggaggtacctgagatttttaatccggttgcaagctatgtgaagtatttcacaatccctgagaatatgaagaacaagagggtgtgtatttcgttccagggagtggagagcggttttgcactctggctgaatggacactatgtcggctacagtgaggacacatttgatccgtctgatttcgagctgactgattatattattgagggtgagaacaagcttgcggtgagggtatggaaatggacatcaagcagctggtgtgaggatcaggatttttacagattttcaggcattttcagagatgtatttttgtatgctgttccttgtgcacatgttgaggatctgtcagttgttcctacacttaatgatacctttgacgagggcacacttagtgtgtcaataaaggcagatggtgatggtattgcaagtgtaaagctatatgagctgggcgatttgtctgtggaaaaatatgacagggcaaagcttttattggaagagtttgatatagagcttaggaataaggaaatttgcgagggctcatgtaatgtgaaaaatcctctgttatggagcgctgaaaagccgaatctgtatgaggttaaaattatagttaaagatacgcatggaaatgagaccgagtttatcagccagctggcaggcttcagacgatttgagatggtagacggactcatgaagctaaacggtaagcgtattgtatttaagggtgtaaaccgccatgagttcagctcaataacaggccgtgtgccaaaccgtgatgaggtgataaaggatattgtcacaatgaaaaagaacaatatcaatgctataagaacaagccattatcctgatgattccatgctctataagctttgcgatatttatggaatctatatgatagctgagaacaatcttgagagtcatggcacatgggaggcatataataagggctatgttgaccttgactttgttgtgccaaaggacaagccacagtggagagaaatgatgctggaccgtgccaactcatgctatcagagagataaaaatcatccggcaatccttatctggtcatgcggcaatgagtcgtttggcggcaagaccatatatgagatgtcacagcttttcagacagcttgataagcatcgtctggtgcattatgagggagtatttagcgatagaagctataatgacacaagcgacatggaaagccagatgtatactccggctgcaggcattgaaaaattcctggcagagcatcctgagaaaccgtttatctgctgcgaatatacacatgcaatgggaaattcctgcggtgctatgcacaaatatacagagctaacagaccgcgagcctagatatcagggtggatttatctgggattatatcgaccagtcaatctataaaaaggacagatacggcaagtggttcctcacatatggcggagatttcggcgacaggcccactgatggagatttcagcggaaacggcatctgctacggcggagagagagaggcttctccaaagatgcaggaggtgaagttcaattatcagaatatctcggttgattttgacagcgactacatctttacagtcacaaacaaaaatctctttgtaaatacatctgtttttgatgcttttgccattcttcttgcagacggtgaggaggtttacaggacaaagcttcagatatctgttccaccgatggagcaggcaagctatgaggtgccggttactcttaaaaattcaatgattgatgtggaaaaagagtactgtattgtggtatcatttgtattgaaggaaaacaccatctgggaaaaggcagggtatgagattgcattcggacagcatatgataaagaagcctgtaagtgagtattcatgcgacaaatcagtcgagcttgttgttggaaacggaaatatccttgtaagaggtgagaacttcaaggcacttttctcaagaatgaatctgggaatggtttcatatgtatatggtggcgtcgagatgcttccaaatactattccactgccgaatttctggagaacacctaccaacaatgattccggcaacatgatgccacagcgctatgcacagtggaagattgccagcatgtatgtgaccaccagacaggatcagcgctttgcagatacatcaccaagggtagaaaaaaatgataacaatatcgccatcacatacacttatttcatgcctaccacaccgcagagctcatgcgaggtgacatacagagtgtttggcgacggaacaatcgagacaacactgtcatatgaccctgtaaaggagcttggcgatatgccggagtttggcatgatgttcaagctggatgccgactatgatacggtaaaatggtacggactcggaccacaggagacatatgaggacagacagcatggcggaaagtatggtgtatacgagaataaagtggcagacaacattgccgagtatctcgttccgcaggagagcggcaacaagtgcagtgtaagatatgcaaaggtaatggataagaagggcagaggaatgctgttctttggtgatgagctctcgttctcagcactgccatatacaccgcatgagttggaaaatgcagcacatcatttcgagcttccacctgtacactatactgttgtacgtgtggcaaagaagcagatgggtgtaggtggagacgacagctggggctcacatactcatccggagtacctgcttgatgcctcagaaaaaatggaatttacattctgtttcagaggaatctagcattttaaggttgtaaggaatattattacgcattttgagaacagagactactactgggactgctctcatggtgtaaataaacgatataagaataaatgatataagaattaaggaggattaaaatgtcaaaattttttaagggtatggatttatcaaccttgctcgagctggaacgctgcggagcaaaatactatgaggacggaaaggagaaggacattcttgacatcatgaaggagcatgatgttgacacaatccgtcttcgtctgtggaacgatccaaaatcagaggatggtgagccttacggtgcgggtaacaatgaccttgttcagactatcgctatcggaaaaaaggttacagatgcaggctttggtgtgcttttgaatttccactacagtgatttctgggcagacccgggaaagcagattaagccaaaggcttggaagaatttcggcgcggacgagctggagcaggctgtatatgattttacacttgaaaatctgacaaagattattgaggcaggtgttaatgtcacaatgattcaggtaggtaatgagctttcaaacggacttttgtggcctgagggaaaggtacctaactacgataatatagcaaaatttgtgaatgccggaatacgtgcctgccgcaaggtaaatgctgatattccgattatgattcacctcgataatggtggaaacaatgagctttatgtcagatggtttacaaacttcatcgaaagaggagaggagtttgagtatatcggattgtcatactatcctttctggcacggctctcttgaccagcttgaattcaatatgaacgatatcgcaaagcgtttcaataaggaccttatcatcgctgaggtatccatgggctttacaatggacagctaccaagagtatgagaagcttgctgactctgagcgcaagggctatgcgacaaaaccggagcttgttgagaagatagattatcctatgactattgagggacaggctgactttacaaaagatttcttaaacagagtggcaaatgtggtggatgaccacggaaaaggatttttctggtgggagcctgcgtggattcctgtaccgggctcaggctgggctacacctgcttcacttaagtacatgaatgatccgggaccatgcggcaatgagtgggcaaaccaggcactttttgactatgatggaaatgtgctgccggcacttgatgttattaagaattttaaaaaataaaataataacatatgtaattttgttgcatgatttgatttgttatgttgcattttcagtcggatgtattgcaatgtaaaaatgtgcagttataatagagttataaagaaaaaacgaattattttaactatcaatttaacgcaaatacaatcagcaaaggagaagaaaaaatgatacagcagaacgtattagacaaattcagggagctttttggagcagatggggatatcagagtatattttgctccgggacgtgtaaatctgatcggtgagcatactgactacaatggaggacatgtgttcccatgtgcactgaccatcggtacatatatggcagcaagaaagcgcgatgacaggaagcttcgtttctactctatgaattttgacaatctgggtgtggttgagtcatcacttgatgagtttacacctgatccggacggactttggataaactatccaatgggcgttatgtgggccttcgagggacgcggaatgaagcttgaaagcggtcttgatattgttttattcggaaatattccaaacggctcaggactttcttcatcagcatctcttgaggtggttacaggatatatgttaaaggatatttacggctttgacgtgacaaatcaggatattgcacttatcggtcagtattcagagaacaactacaacggctgtaattgcggtatcatggatcagtttgcatctgcaatgggcaaaaaggacaatgcaattttccttgactgcaatactcttgattttgagtatgcaccaatcgttttggacggtgcaaagatcgtggtgacaaacagcatggttaagcacagccttgtaacaagtgcttacaatgacagaagaaatgagagtgcacaggctcttaaggatttacagacagtatgtgatatcaatactctcggtgacctgacagatgaagagttcgaggctcataaggatgcgattaaggatgaggttgcacgtaagagaggcaagcatgcggtttatgagaaccagcgtaccatcaaggctgttaaggcattaaaggaaaatgatattgagacatttggaaagctcatgaatgcttcacatgtatcacttcgtgatgattatgagacatcatgtcctgaggttgacgtacttgttgatgaggcatggaagattccgggtgttatcggatcacgaatcacaggcggcggctttggcggctgcacagtcagcatagtaaaggacgaggctattgatcagtttaaggcaaacctgacaaaggcctatgaagagaaggttggaaagacacctgagttttatgttgtttcaatcggagacggacctagccgtctggcataaaatcagcaatatgaaataacagtaacggataaacagggttttcccgacaatgattaaggagcatgacatgattcaggagagaatattagaattagtaaaatatggtcttacaacaggacttgttgaccctgctgatgaggtatacacagtaaacagacttctcgaggtactcggagtggacgatatcgaggatgagacctttgagaaggtagcggctcagcctgcatggacacaggaagaggcagaggcgaagcttgagggtatactcgaggatatgatgacatacgcatatgacaatggcatcatgaaagaaaacagcattgtatacaaggatctttttgatacaaagctgatgggctgccttgtaaatgcaccaagcgtgatcagagctcgctttaaggatttatacgacaatgagtcttcacttgcggcaaccgattatttttacaaattaagctgtgacagcaattatatcagaagacagcgcataaagaaggatatgaaatggaccacagacacagagtatggcacacttgatgtgacaattaatctctcaaagccagagaaggatccaaaggcaattgctgccgctaaaaatgcaaagcagagtgcatatccaaagtgccagctttgtaaggaaaatgagggctatgcaggccgcgtaaaccatcctgcaagagaaaaccacagaattatccctgttacaataaacaacagccagtggtttttccagtactcaccatatgtatactacaatgagcactgtattgtgttcaattcaaagcatacaccgatgaaaatcgagcgtgccacatttggaaagctgcttgattttgtgacacagtttccacactattttgtaggctcaaatgcagatctgccaatcgttggaggctctatcctaagccatgatcatttccagggcggacactataccttcgctatggcaaaggctccgatagagaagaaaatcacattcaagggctacgaggatgtcgaggcaggtatcgtaaaatggcctatgtctgttatcagaatcaagtcagcagacaaagataagcttattgaccttgcagataagattcttcttgcatggagaggctatacagatgaagaagcatttatttttgcagagacagatggagagccacacaacactatcacacctatagcaagacgtcgtgacggagactatgagcttgaccttgtgctcagaaacaacatcacaacagaggagcatccgcttggggtatatcatccgcatgcccaccttcatcacataaagaaggagaatatcggacttatcgaggtaatgggacttgcagtgcttccggcccgattaaaaggtgagatggcagagcttagggatgcaatccttacaggaaaggatctgcattcgactgagacccttgcatcacatgctgactgggctcttaagtttatgtctaagtatgataagattgatgagtcaaatattgatgatatcatcaatgaggagattggacttgtatttaaagaggtgcttgagtgtgcaggagtgtacaagtgcactgatgagggacgtgcagcgttccaaaaatttatagatgcggtaaacttataatattttctttttataatacggaaagcaccggcgaaccatactatatatttcgcaagtactacgcagctaagaagcagtaagaattatgatttagggtgtttagaccatgacacaaccggcttttatgtgccgtccatggcacataacgccttgccccagcgtccatgctggggcattgttgtatatggacataattctaactgcttctaagctgcttcgtaaagctcaatatatagtatgttcgccggtgctttccttaggttgtgaaataaattaatttttaaatacactattaaatacatcattggtaatgacttttttaataaagacttgtaacttgactagattttgctttctgcaatttatgcaggcagtggatgaatgcaggcaccaggaaggcatctgcgagaatccatgcgagtgggcttgcaaagcaggcggcagaaaagccgaatatcggtacaaatacaagcccgatgagcgaacgcgcaatcatttctgctactcctgcaaacattgcaaaacctgaaaagcccatgccctgtatggtgaaacggactgtgtttaccagaacgagtgggatgtagaaaaatgcatttatcagcagaaactgatgagcctgtgcgacaacctctgtttcgcttggtgatacaaacaggtaaatcagatagttggctataaacagcagtgccacaaaaatcaaaaccgaatagatcgatcctataactgaggctgaaataagccccttctttacacgttcaaatttggctgcgccgacattttgtccactgtaggtggccattgtggagccgagtgcgtcaaatggacacaccataaacattgaaatacggcttgcagcggtcattgaggcaactgcgatggagcctaagccgtttacggcagtctgcagtatgacgctgcctatagcggttatcgaatactgaaagcccataggaagtcccatgaccatcagatttctgacatatgaagagtcaagctccaaatcatttctgcttacatgcagcagaggtacattttttgctatgtaaatgatgcacagcactcctgatacaccctgtgacagtacggttgcaaaagccgctccaaacacgcccatgttaaataccagaatgaaaagtaaatcaagaccgatatttagaacagccgcgattataaggaaaataacaggtatgaccgagttgccgagagatctcagatatcctgacagcagattgtacagtattgtggcaggaatgcctgcaaatatgacaatcagatactggtaggcgaggtcgtaaatgtcgcctggcgtattcatccaggtcagaatgtgaccacagagaagcacagtgagtgccgtcatgattattgcgataattacagagacaattcctgcatttcctacatattttttaagtcctttttcatccttggcaccaaagcgctgtgctataggaagtgaaaagccggcacacacaccctggcagaagccgatgatgagaaagcagatgcttccggtagagccgactgcggctaaggccgaaacacttagaaaacgaccgacgattattgtatccataaggctgtaaacctgctggaaaagcattccgagaagcagcggaagggaaaagcccagaatgagcccggtaggagaacctacagtgagatcctttgaattatttttagtcattatttataatcccccttgattaaaaatagataaaaatatatataaaaatagtgattaagtgtaatatacaacctttacaaacataagtaaatgaggtaaagtaaaattgttagcatttttttgggtgcatattttaaagtgaataaaaacgctgattttatgtttgatatcatgtttttttgagaagaaaattgaataatcagtaaatatgtatgggctgacatataattaaatttggaggaaaagaatgagagactgggaaaataacattcgaagggttgtaccttatacaccgggagaacagccaaagaatacctgtgttattaagttaaatacaaatgagaatccctatccgccagcaccgggagtgaaggaagttttaagtaatttcaatacagatgatttaagactgtatcctgatccaagggttgataagctggtaaatgcaattgcggatttctataagatagacagctcaaaggtgtttgtcggagttggctctgatgatgtacttgccatgatttttatgacatttttcaattcgaaaaagccgatactgtttcctgatattacatattcattttatgatgtgtgggcagatatgcttcgaatcccttatgagcagcttccattgtctgatgatttttcaatagtaccgtcagattactataaggcaaacggcggagtagtatttccaaaccctaatgctccgacaggaaagctcatgcctcttgatgagatagaggatataatagagcacaatcaggatgtaattgtcgtggtagatgaggcatatgtggattttggcggggaaagtgcgcttccgctcattgacaaatatgataatgtcatcgtggtacagacattttcgaaatcacgctcgctggcaggctcaagagttggttttgccatggcaagtcctgtgcttatcaagtatctgaatgatgtgaaatattcgttcaactcatatacaatggacagaatcacaatcgaagcagctacagcagcggtaaaagacagagcatactttgaagagaccacagcaaaggtcataaagacacgtgagtggacaaagacagagcttaagagacttggctttacattctgtgactcaaagagcaactttatatttgcaaagcctgcaaatgtttctgcaacaaagctttttgaggaccttaaggcagacaatatatttgtcagacatttcagctcacctgagcgaatcaacgattatctgcgcatatccataggaaccgatgagcagatgcatacactaattaaatttttggagaattattcatgttaaaaaaatatatttacatctttttaatttcaatggtaccacttattgagctcagaggagcagtgccggtttcgcaggtgatgggcctgccgatagtgccgtcatttatagtttgtatcattgcaaatatgcttccggtaccaattatttatctttttgcaagaaaggtgctcatctggggagcagacaaaccaattattggaaagttcttcagcttctgccttgaaaaaggagagaagggcggcaagaagcttcaggcaaaagccggaagaggtctgtttgttgcacttttacttttcgtaggtatcccacttccgggaacaggtgcatggacaggaacacttgctgcaagtatccttgatatggatttcaagtcaacagttgccgctgtcatgcttggagtactgcttgccggcatgattatgatgatagtaagtctggcgggcgtgtctatattcctgtagaatttatggggagctttcttcgtcctttgttaaacagtacaaatccgaccaccagtgaaacaattgtaaccacaatcacaaccacaaagaccactacactattaccgggatcagggaaaaatcctgaaagtgtgccccaaaggttgaaaagcagatgaagccccatagagtagtaaatagagccaccgcgttcgcacacatatccgagcactatgccaagtgcaaaggcatatatgccctgaatccagttgagatggaacagtccgaaaagtgcagcctgcatcagattggcaagagcaaatggtaaagcctttctggcacagcgcatggttacaccgcggaatataagctcctcacagattggcgccagtattacagaataaagtactgtcacaaaggtggtatctgtgatgccggatgtttcaaaaagcttgttgtactgctgcagccagtcgggacggatgtagccggttaagttagcgatgaaattggcagcaaactgtgtacccggcacgagtatgacgattgccacaatcatcatgggattgaaggttttcttaggggatggaagaaaattaccttcgtatctggcatagtaccacatgccaaaaatcgcaatggtaatgagtgcatagatgatcataatcatcatgttaaaatttacagaggtaaatgtcttttcaaggcggtccgatacgtttgcagacggaaaagcaagctttccgacaaaaacctgtccaaacactcccatgcccatcataaagaataaggcgatagtctgaattgcctcaactgcaagcagtgggacaaatgtgtaaaagaaatatcctacttttttcattttcaatttactccattctgatttattaggcgatagtaacattagtataacatatcataatttaattgcaagaaagctgtttactttaaaactttaatatgttaaaattaaatgtaaataaatcgcatgaaaaaggagaacacgatgagcaagaatcttaaaacagaagcagtagaccatttgtttgatgctattttgtgtctcaaggatagagcagagtgttatacattttttgaggatgtttgtactgtaaatgagcttttttctctatcacagagatttgaagtggcaaagatgcttagagagcagaagacatatcttgatatagcagaaaagaccggggcttccacagccacaatcagccgtgtgaacagatcattaaactacggcaacgatggatatgatatggttttttcacgcatggaggatggctctgacaaagaggattagtttatcatagggggaaaaaacaggctcattaatttgagcctgtttttttactttcctttccagaatgtgtattttcatgggaagaagcctctttttcttcatttagattgtcaatcatgcgctcaatcagcattttcttgatgtagacatcaaagctcagcatgcagataaagctgaatgtgtgaagaaatttctgatcctcatcaggaaaatcctcaaatgtctcaccggcaatcttgtatttcttgccgagatcctttaagagcttttgcgattcctccgcctctaagctgaaaacctcagtatagacatcctgcatcgtaaatccgtcatcattgccgaaatacttctcggtaagcggattaagaatcgagcgtatatcgttgatgctcaatatatttttgaaataatatataaaaagcagtgtgagcacatgctccttagaatactttttcttgtccggagaagggagcagattgtttttggcatagttgtttatcattgtcttggtaaggattttgtcgctttcatagcgctttgatgcagcgagctgctcgtccatgaaggttgtgacctgatccatgtacagatcaatatttggtatatcctccggctttatgtaatctattgatttaagctgttttaataattctgataaaaattctttaacgtcattctccatatcatcacctcaggcttttattatatagtattgaaaactatatgacaagttttttttgaattttctcatattgggttgtgcaaaacatatgtttgtgatatgctgtagataaattatttttgtatttatggtttgtgtgcctgtaataagactggagaattgagaggaaaacagatgaacttagatatgttgaatgaacagcaaagggaggccgttttgaccacagagggaccgcttcttattttagcgggggcaggcagtggcaagaccagggttcttacatacaggactgcatacctgatagatgagtgtggcgtcaatccttacaatatcatggcaatcacctttacaaacaaggctgcgggagagatgcgtgagcgaattgatgatatggtgggctatggttcggaaagcatatgggtttctacattccattcgacatgtgtacgtatactgcgcaggtatattgacaggctgggatatgacacaaattttaccatatatgatgctgacgaccagaaggctctgatgaaggacatctgcaagcgtcttgagatagataccaagatgtataaggaaaagatgtttttaaatgtcatttcatctgcaaaggatgagatgattgatccgatagagtttgaaaaccgcttcacaggtgacttcgtgaagcgcaagcaggcacttgtatacaaggagtatcagaatgccttaaagcagaataacgcactcgattttgatgatttgcttgtgaagacagtagagctttttaagctggataaagaggtgctggattactatcaggagcgcttcagatatatcatggtggatgagtatcaggacacaaacaccgtacagtttgagcttatcaggcttcttgccatgaagtataagaatctgtgtgtggtgggtgatgatgatcagtccatttacaagttcagaggtgccaatatctacaatatcttaaactttgagaagcattttgaagatgcaaaggtcataaagcttgagcagaattacaggtctacccagaatatcctagatgccgccaacagcgtcatttccaacaacgtgggtagaaaggacaagcgcctttggactgacaacggagctggagacaggattacctttgaacagcttgagagtggcttcgaggaagcggattatgtggcgcgttcgatagcgagactcgtgagaaagggtgaggcgcgctataaggactgtgctgtgctttaccgaaccaacgcacagtcgcgtcttttcgaggagaaatttattgcagcaaacattccatacaagattgtcggcggcgtgaatttctatgccagaaaagagataaaggatatccttgcatatttaaagactattgacaatggccatgatgaccttgcggtaaagcgaataataaatgtgccaaagcgcggcatcggagctacgagcatcaataaggtgacggactatgctcttgagaaggggatagatttctatacggcactgcgctatgtcgatgaggtgccgggcatggcgaggtcggcaggcaagataaagccttttgtgatgtttatacagtcacttcgtgcgagagccgagatggattcggtttcgcagctcatacaggcaataatcgatgagaccggctatgtcgatgagctgaaggctgagggcacggatgaagcagagcagcgtattgagaatattgatgagcttataaacaaggctgttgattacgagcaaggggaggagaatcctactctcagtggctttttggaggaagtggcacttgtagccgatatagacggtcttgacgaaaacagcgactatgtggttcttatgactctgcacagtgctaagggacttgagtttccgaatgtgtatctggcgggtatggaggatggtcttttcccaagctatatgtcaatcactagtgatgatgcgacaagcgagatagaggaggaaaggcgtcttgcttatgttggcatcacgagagccaaggagcatcttaccatcacatctgcacgcatgcgcatggtgcgtggagagacacagttcaacaaggtatcgcgatttgtgaaggagattccgcgtgagcttatggcaggcgaggtttatgagccaaagcgccgtgatgatgaccttgaaagaaattcacagagcacctacagaaaggctaaggaggccttcaaaaagacacctacatacggcatagagtatgcgaccacctttaatacacagcgtacaaggacacctgtctacacgcctgtgagcaatcagaagtcatttgccagtgccaataccaccggaggcctttcatataaggtaggggacagggtatctcacatcaagtttggcgcgggagaggtcatggcaattgtagaaggcggcagggattatgaggtcactgtggactttgacaaggccggtaccaaaaagatgtttgcttcatttgccaaattgaaaaaaattgactaaaattattgtaatttttataggaaaattggatataatatgctataatggatttaacaaatagcatttgacaattacttttggaaaaggagcggattgaattatgagtaaagttgaagaattattaaaggacaacaagcttgcagagaaactcagcatggcaaagcttaatgaccttctcaaaaaagaagaggaagacaagaagccttccaaggctgttatcatatttgccatcattggtgtattagttgcagtggcagcagcggcatatggtatctacagattttttacaccggattatttagatgatttcgatgatgagtatgatgatgaattcgatgatgatttcttcgaggatgaagacgatgatgatgctgaagaggaaaaagaggcaccaaagactaaagaagagaaataatcgtttttagataatgggggctacatatgtagtcctcatttttctttatgtgtgaagcaaggcatttgcagtcaggcatacaaaggaataataaagtataaagagagataagaattacatgaaaaaaggatttagaggaacaggaaccgtagaaagagtagacttcccaaacaagggaatagccgttacagatgacggcgacagagtaattgtgaaaaatacaattccgggacagaaggtggaatttgttgtaaataaagtaaagcatcaaagggcagagggcagactcatggaggtaattgagaaatcgcctctggagacagaagagccatgtcctcactttggaatgtgtgggggctgtacatatcagacagtgccttatgaaaagcagctagatatgaagcttacccaggtgaaaaagctcatttcggatgccatcggaactgaaaaagaggcaggatatgagtttatagggatacatggaagtccgaaaaagagtgaatacagaaacaagatggaattttccttcggtgatgagtacaaggatggccctcttgcgcttggcatgcacaaaagaggaagcttttatgaccttgtgacagtatcggactgtcagatagtggatgaggatttcaggacaatattaaaggcaacacttgattatttttcaaaaaacaatatcccatatttccacagagcaacacacaagggttatctgcggcatctgcttgtcagaaaggcaacaaaaaccggtgaaatcatagtcgaccttgtcactagcacacagacagagggcttcaacgaggaggagttgctcgcaggttttagatatgcacttttgaccaggcactatgacggcagatttaagggcgttttacacacaaaaaatgacagcgtggcagatgtggtcaaaaacgagggcacagaggtgctctacggagattcatatttctacgaggagctcttaggtctgaaattcaaaatcacaccattctcatttttccagaccaactcactcggagcggaggtgctctatgagacagcgagagagtttatcctgggagatgacaaggattcgctaaacggtaaaacagtctacgacctctacagcggaaccggcaccatcgcgcagcttatggcaccggtgtgtaaggaagtagtaggtgtcgaaatagttgaggaggcagtttgcgcagcaaaggaaaatgcagctcttaatggtctggataactgtaaatttatcgcaggtgatgtcctcaaggtgcttgatgagatagaggaaaaaccggattatataattcttgatccaccacgagacggtatccatccgaaggctatcgggaaaatcatagagtatggtgttgagaatatggtttatatttcatgtaaaccaacaagcctggcaagggatttgcagatatttatggccagagggtatagagtggagaagatatgctgcgtggatatgtttccgaatacgtatcatgtggagacggtatgccagttagttctgagaaaaccggcagtacat

SEQ ID NO: 1537 - DNA, 455 bp, Unknown
  gut microbiota DNA sequence
taagaaacctcattccacattcataggtcataagcctagcgcccatcggaagcagctttatctcttcctgtgaaagttttccaccacagccctctataaagcccttcgcacatgcttcaaaaagctctaaatcgcaccacactttatccagattttgttcatcctctaatgctgtacttgctccaatccgcaccgcatctccaaaatcattcatggctaccccaggcattacagtgtccaggtcaatcacacatattccttttttggtatccttatccatgaggacattattaatttttgtgtcattatgagtcacacgaaaactgattttcccacttctcagcaaatcctgaaagcagtccacaatttcttccctgtccaatacaaactgaatttcctcccggaccaaatccactctgctgcacacatcctcttccactgcctttttgaatgtc

SEQ ID NO: 1538 - DNA, 2855 bp, Unknown
  gut microbiota DNA sequence
cagcctttgtctctctcttagcctgctttgccgcaagctttgcttcttttgcctcactctttatgcgactctttttgttcttctttacactctttttggctaccttatgtagttccttgaggtctgactttgcagcctttatattctttctgtccttgcggtatggattgtgtacgaaatatcccacagtgcctatcatcataagaagcagtgccagcgcctctccagccatcgtgacatactccagatactgcggatacagcttgtagcctatcagctccactgctatcaggataagcgggatgaaaaacagtatattctttcgcttttgggacaataacgctccctccgcgcctacacacatgagtatatacaggcacagctgcgaagtcggtccataggcatatgccacaatcgcagccattattacagatatgcaaaacactatgaatgcttctccgcggaatagggcattcctgtactcttttatgccctccagcttgtctactgatatgccatgcagtgaatatacctggtctgtgatatcctccatacagccctcatggtaccgcttcagctccctgttgctgtttatatcagcatctatggagcgcctgcgctctgtaagcagcttctgctcctccatgatcttctcccaggcctcatcctctgcctcacgctgcagcttcacctgctcatgaatccactcagcccgctggatgcgctcgctctcctgcggtataaccatctgctgcgtgtctactgtctgctgcggtgtttgagtctcctgcgtcatgctgttattttcattttcattacttaccatgccggtttttgttctttttcttccagacatttttcttcctcttgcaattgttatttactgctatcaaaatgttatctgcttatttcgtatatgcttctattatacactgatgcttctttgtctttttatcatatgttataccgacaagcaaaatattacctgtatattgctctatcgacttcatgtattgtttttcccttatttgattaatcgctgtttttgctgtcttattccatttcagttcaacaaccattgccggataatctatcgcaaattccggcttagggatataaacaaaatccgcaaaacctctgcctgtaggcaattccctcaccggcttaaaataatagttcattgcacccagatacgctatagtaaggacgctgcttagagaattctcattgttatactgaattcctgatgcatactcatcatgaattcgtcctatcatttcagccacaatatcattttccatgtcaagtgtcgcatccaaaaggaaaagcgattcattttcaaatgtaataagctccttccatcttgtactctcaacagcggttgtcagctcctgccgtatctcctcatttggaataaacgcacaactctttttctgatcaaatcccagataccctaaatgaacaagatatgttaaaacatcatctttatttttaaagctaaccgtatcattcataaaactgccggtgttcacctttatttctccaccggacagcatctgaattattgcggtctttaatccatcaaaatccaaatttataagtggaactatgacatcataagacccggtctctgaccaataactctttaagtctccctgaagcatgtaatttactactgcacgcggattgtatacatggtaatctcccagcatatatccatcataccaccgctctacctggctaaaattcctgccatagcgatcacatatgtctctgacctcatcctcagtaaagccaatatatggggacaaacgtcccgcatataacatggtatattcatcaaaattattaagtgccgactgcgtctttagcttttttatcggtaaaattcctgttagaaatgcaagctctatatactttgttggttcacttcccttaaacattcctcgcaggaaattgatatattcctcctgaactgaggaatttgctgcttcatcacgtatcaaaacatcccactcatcgattataattacaaatttattgttcgtcatgctgttaataaccgatagagcaccatacaatgttttctgatctcttaaatcaatatccttgtacagatctgccaactctgatataacatttttatttatatatcctgatattctttccggcgcaccggcatccattagtatccactgcatatcgagatgaataacatcatacttgttgagatatttctcaaagtattctgtctgtgcaatgttatagttcataaataattctctggaatcacagcccttgctgtaatatgctgtaagcatatcggccgtaatagacttgccaaaccttctcggccggctattacatatatatgcctgctttgttccaagcacactattggtaaaatcgagcaagcctgttttgtctatatatatctcggaagctaatgccaccttgaatgcactgtttccgggatttacaaatctccccattgcgttcatctcctttactgctatatatcttctattaaagcatattttagcggaattttccatagaatatgcgcatgatatccgcaaaccctgaaatttttggtgcccgataccattaaatttttcaaattagaatttcatttacatactccttaaattccattttcttaattttataaacttgaagtttctcacttcttcatcttaggggcaataagcagcactattgttacaagaaaatatacgccatacaatgaatatccgtacaagacgcgatgtcaagaaatttttagaaggactctctaccggaagttccagccttcttaagaatgtaaccggtggttatcattaccatacaattga

SEQ ID NO: 1539 - DNA, 1422 bp, Unknown
  gut microbiota DNA sequence
acgattacatctgcttttacctttgttatatcgttgcgaacaatcttaaatggcattgtggcacctccttatccatgcctgtattactttaacagcttccttatctgcttatccgttgcctcgggatacatctcatgcatataatctacaatctgcttccatgaatcctgtggattatccttataacaggaagtcacataatcgtatccatagatatgctcaatagatgaatacactgccacatcccatccatattcaatacctcttttattcactctcttcttaaaatcgcagttgcacagatatgtctgcatcataagattcgttattgcaccatcaaatcccttttctccatccttaccaaatccagcttgttttttcaattcatttgaataaatctctgaatcagcattatcttccataaaattgaccattatctttttatgcttattaggcgcttttccatcatcatataatgcatcaaaatcatatccatcccggcgataattagcaaatacaggaagccacttttttgatataaatcctgccttcttatcaaagaattttccatagacgatatcatgccgccttgctataatagcccgccacatccatggatcaatctccggattatcactccaccagtactctggaacagttctttcttcaagtgaaaacccatctatttcattcttaaataatggtaaaaagccaaattcatttatatacttgattgcttcatctacagaatggatgcaatccgggttgtcccaattaatgccatgcataatccattcacctgattcgtttcccataatacacctctatatgaacactattacagtaatactactcccaacagcaagcttataagcataataatatatccaattatcaatgtcattatccagcatgtattgacaaaactcatattttatgttcctgcccctcgatttctttttgaatccatgtcataattacatctacaagataatcctgctgcacctgacttagttccttgcccggctgcattttatgccactttcggatgcactctctgcagcatgtagctgttgcatgctgagcgataaataccggatgaccattcattggtgtctgcttgccatcatttgctatatatgccggagcttctctctttgcaataaaatcctttgcatgttgtctgattgtgtccaatcctttttcatttatgtaatcaatatctttctgcttcagatggaaactgcttcggaacctggagttatccagccgctcaaataactgcctgtaccactcatccttagtcattaaaacttcacaccactcgttccatgaaaatcacctattattactatctatcaataataggattataccaccatttacccctattcaacaaaccaataattttaatacaaaact

SEQ ID NO: 1540 - DNA, 793 bp, Unknown
  gut microbiota DNA sequence
gttatctaaaatatggcagaaaaactatgtagatggaaagccggattacgcggatgcatttgaggacaatatgattttcagatgggattcgcagattggcagaggtgtggacagttcatatgtgtcagatgtggtgaacactaaaagaaagcatctgcttgtgaaaaagagtgatgcggagtcaaatttttactatatgggagagtttgatatagttgatgtgtgcgctgccagaaagcgtgataacaatggtaaagagcgtgatatcaccaagtttgagatgaagatgcatcaccctgtaagagaggacctgcttcgatatctgcagagcaatttacaacaaagcatacaaattaatacacaggagcttaaggcaatatgaaaacaatacgcgtagtggctgccgtcataagagcagtcaataatgaaaataaactggttatctttgcaacccagagaggctacggagagttcaagggcggctgggagtttccaggcggcaagattgagtctggtgagacaccgcagcaggcgctaaagcgcgagataatggaggagctggatacggaaattgctgtcggagaattgatagatacgatagaatacgattatcctaatttccatctttcgatggactgcttctggtgtgaggtcattcacagtgagcttatcctaaaggaagcagaggatgcaaaatggctgacaaaggagcatctggcggacgtaaagtggctgccggcggatgtgacattgattgagaagattggagaggagttgcatgaaaccaaggaca

SEQ ID NO: 1541 - DNA, 1727 bp, Unknown
  gut microbiota DNA sequence
agttcacggaattcattgcacacgctctccacatagtccaaaaactccgggaaatctaatgcaagctttaaatatccgccatatccgatacggtcgattggttttcttaaaatggcacggcgtgctgtcacccagttttcctttgcttccttgacaggatctccgccctcatggaaggtatccggaaaaaagtatggaaggaatcttccttctgtatattttacaccttcaatatcagagatcagacgaagtgtacttccgtttccaacgcttcctaccactgcgtcaagaccgatcgttgcaaactcttccatgaatggttctgttccgatccagtgatcccccaaaaacatcattgcctctttgccgcattcatgtgtgatgtcaaccatctcttttgcaagctttgcaacttccctgcgctggaatgcctgaaaatccttatattctttaccaggtacacgatactgattgttataatatccctggtcaatgatatattccgggcggaatttataacccatttctttttcaaactgctctaaaatataaggacttactgacgcggaataaccataccaatccacatatttttcccgctttaactcgtcaaacatcaatgtaaactgatggaaaaacgtcgtatagcgaatgacattgacatatggatgctcctcgcagaatttacgcaggcgctccatggaatatttatgtgttttcggctgccgtacgtcaaacgtaatctgatgttcgaaatctttccagtcatttgtcaccgcattgtacatatgtaccggatcccagataatatatgccagaaagcttactgtatattcatgaaacggttctgcctcatgaatacagacgcaccctgactcctcattatattcccactgtttggtcgataccacctgacctgtggaacggtcaacaacctcccaccatcgtttaatatcatctcttgtattgacctgcattaactcatccgaaatccccttcatcagaggaatttgcagttcgctttcaacagccgtataaaatccactcataatataacactgctgcacctcatccgggttcgccttcgcccactcattatcttttctcgtggtgtagtaagttgcataaatctttgccccggtctttgtcagctcttccgggaattctgttccgtcacaatcgcggattgcatctgcaccccagcgtttcattaactcaattgtctctggaaccacatccagatttgtaggaattgtgacacgtcctgtatttttctcactcatttttcttcctcactctatttcatccatataattactttcttttcttcttttctgcaaaagggcaattataaatccacaatgccattaataaacagataattccaataagcataattcctaaacctgtcatttttcctgtcataccccatccaaaaacagacaggcttattccggcaataaaaagagctgccattaaaattattctgcattttgtgtgctttttccaaaattccattttaatctcccttctcatcaaccctttaaaccaccaacagtcattccctgtgtcagtttattctgaacacatatatataaaattaatgtaggaagcattactattacaagtcctgcatacataattccatactgtgctgctgactgctgtgcctgcatcagatttaataatcctaccggtaacgttttcggtccctttgccgaactcat

SEQ ID NO: 1542 - DNA, 538 bp, Unknown
  gut microbiota DNA sequence
cattgtaccttgaaaacttcatacaaatgatttgatgaataaatattctattcttaagaatatctaacaatcaagacatccgagaaacaaaaccaagttgtgaacaacaacaaagttctttaagttattaatgatgcaacgctatgcatcgaagagattaagcaaagaagagcgcagggtggatgccttggcactaagagccgaagaaagacgtgataagctgcgaaaagctgcggggagatgcaaataatccttgatccgcagatgtctgaatggggaaacccggtacgaagaactcgtatcatccatacgccaatccataacgtatggaggggaacccggtgaactgaaacatctaagtagccggaggaagagaaagaaacatcgattttgttagtagcggcgagcgaaagcgaaagaggccaaaccggagtgcgtgcactccggggttcggaccgcatttaagattcagtgattctagcagaaaggtttgggaaagcctgccggagagggtgaaagccccgtaagcgaaaggaga

SEQ ID NO: 1543 - DNA, 3174 bp, Unknown
  gut microbiota DNA sequence
accatatgcgtagctttgatcattggtctgccgctcggctatgcacttttttcctatgcaaaacataatggaatatttggaatgaatatctatcatgttccaatcgtaccaatttttattatgatttttttggtcggtctgttgcagattgtactttcctgcgttttaagcagtaatctgaaaaaggaaacgctggttgaaagaataaggtatcagggatagccgccaccaagtcttttcaagcggtcatcatctaatgtaaattcctttttcagatattcctttattctgtcggagattaattataaaacattactttacaagaagaataaaaaagcatataattcttttataatatatttaataaaagagggtaagaaaacggaaaataaagataaaaaaaatataacaagaaaaaaaataattaattatgttctaaacaatcatgttacatccaaggcgggaatcgcaaaagagttaaacttgagtatgccgactgtgttagcaaatgtgaatgacttgttagaaaaaaaggtgttggaagaaactggggaatatgcttcgaccggtggacggaaggcgaaaagtatagggattaataagtcatactgtcatgcaatgggaattttgattacagcgaatcatatagaaatggtattagtaaatcttggagatgagattataaaaaaagatcgcatccgtttaaaatttacggcagaattatcctattgtacagaggtggcacaaaaggtcaaaacttttcttgaaggcgaattagcgaaggatacgctgcttgggattggagtggcgattccgggaattattgatcagaaagaacggatcgttttaaaatcccatgctttaggtatagaaaattatagtctgcgctttttagagcaggctctggaaattccagtatattttgaaaacgatgctaatgctgcaatgcttgcagaaaaaaagcaaaagtatccaaatgcgatatatctgtctttgaaccacaccttaggaggtgcattctgcatagatggaaagctgtttcgagggcagaaccagaaagcaggtgagtttggtcacatgatactcgttcccggtggaagaaagtgttattgtggtaaatcaggatgtgcagatgcatattgcgctgcaagtgtactgacacaagataacaggcagtcactggatgcatttatggaaaaaattgaaagtggtgatgaaaaagttttgcagacatggaatgagtatctggatcatcttgctgttttgatatcaaatctgcggatggcatatgatatggatatcatactaggaggtgatgtgggaggtgtattatcagattatatgataccactgggagaaaaagtgatggcatataatggctttgagcatgatgtttcatacttgaaaaattgttcgtataagaaagaagcgtcagctgttggagcagcgaaatacttttttacaaaacatatgggtgaattgtaaattttttgatcctcatatcatattatagtaaaaaacggaaagaaaacagtaactacggtttcctttccgtttttttttgcgtgttaattgtgaaaaatatacaaaaaatatattctgaaattgtgaaatatataaaaatatgaaaaaacatattgacaaattgtgtttacaaggtaataatgtaattactttaataaaacaatttataaaacataaaataaaacaacataaaaaaggaggaaacaattatgttacagcaggtaatgacaaatccgggagaaattattttcagagaggttccggttccggaggtaaaggaaaatcaggttttggtaaagattatgaatattggtgtttgtggatcagatattcatgtttatcatggaaaacatccgtttacaaaatatccggtaacacaaggacatgaggtttcaggtgagattacagaacttggaaaaaatgtcacagagtttcatgtgggacagaaggtgacgatagagcctcaggtatattgtggacattgctatccatgtcgtcatggaaagtataatctctgtgaggaattaaaagtaatgggatttcagacgacaggaacagcatctgagtattttgcagtggatgcatctaaagtaacacctattccagaagatatgtcctatgaagaaggagctatgatcgaacctctcgctgtggcagttcatggtgtaaaacagatgggcgatgtggctggcatgaatattgcagtccttggagcaggaccgattggaaatctcgtggcacaggcagcaaaaggaatgggggcagcgaaagtgatgatcacagatatcagcgatcttagactggcaaaggcaaaagaatgtggaattgatgtgtgtgtgaataccctaaataaagactttggtgaggcaatgatcgaagcatttggaccggataaggcggatgtgatctacgactgtgccggaaacaatatcacaatgggacaggcaattaaatatgcaagaaaaggaagcacgattgtactggtggctgtttttgcaggaatggctgaagtagatcttgcagtggcaaatgatcacgaacttgacattaagagcacgatgatgtaccgccatgatgattacatagatggaatcagactggtaaatgagggaaaagttcatttgaaaccgctcatctcaaagacatttgcttttaaagattatctgaaggcatacaagtatattgatgataaccgcgagacaacgatgaaagtaattatcaacgtcagtgaaaagtaaggagttcgtatggaaaacaaaaatggaaaagtaccgctgatcagtaagattgcatatgggtttggtgatgttggatgtaatttcagctggatgttcgtcagcaattttctgatgatattttatacagacgtgttcggaatcagtatggcggctgtgtcagcacttatgcttttttcaagattctgggatgcaatcaatgatccaattgtcgggggacttacggataaaacaaaatcgagatggggacggtaccgtccatggctgttagtagcggcaccaattacagcgatccttcttgttatgacattctgggcaagacccgaatggccgcagaatggaaagatcatttatatggtaattacatattgtctgctggttttggggtatacctgtgtgaatattccatatggaa

SEQ ID NO: 1544 - DNA, 21414 bp, Unknown
  gut microbiota DNA sequence
acgttcggttgcagctatgattgcaattggtgtgttaaatattatcacagttccactgctcagcaaattcggcagtcatagtgcaaagacaggatatctgacggttgcggtcatatatggatgtatttttacagcctgtcatttcttctgctttgcgaagacgaaagaggcagtgattactccggaaaaagaaaaaatttctgtaaagatacagttgaaagcagtcatgcagaacagaccatatcttcttgcattggcaggacagatattatttggattcacactgtatggtagaaacgcagatattctgtattattttacatatgtggaaggaaatgcctcctactacacaacttattcgatgtgtatcattattccttctatcataggggcggcctgttttcaaccattattccgcaggttgaataacaaaggaagaacagcatctctctttgctttatttacaggaatttccatgttgtctatgtttttcttcaatgccaaagaatcaccggctattttttatgcattatctggtctcacacagttctttttctctggatttaataccgcaatctatgcaattattccagactgtgtggaatatggggagtggaaaacaggacttagaaatgacggttttcagtatgcatttatttcacttggaaataaaatcggaatggcagttggaacagcacttttagcaggattacttggaaaatgtggttatattgcaaatcagacacaaaatgcaactgtactttcaattatgaaacatgcatttacgacgattccaggtgcactttggattgtgactgcggttgtattatttttctaccggttaaataaaaaacgttataacgagattgtggaggaactgaaaaatggaagaaaaagttgatattgtggcattgggggaattactgattgattttacggaagcaggaaacagtcaggatgggagaaaactgtttgaacagaatcccggcggtgctccggcaaatcttctgacagttgcaagtcattttgggtatcgcacctcttttattggaaaagttggaaacgatatgcatggtaaatttttaaagaagacactgcaaacggaaggaatcaatacagatgctatcgtcgaagatccagattattttacaacactggcatttgtggaaatcggtgaaaatggagaaagaaatttttcttttgcaagaaaaccgggtgcagatacacagttaaaaaaagaagaactggatcagacgttaatttccggatgcagaatttttcattttggatcattatcgctgacagacgagccggcagaaagcgcaacgatcgaagcagtaaaaatggcaaaagcagcgggtgtacttatttcatatgatccaaattaccgcccgtctctttggaagagcaaagagtatgcagtgaaaaaaatgaagtctgttgtagaactggtagatgtcatgaaagtatcggatgaagagagtattctcctgacaggagctaaaagttatgagcaggctgcagaagaaattcttgctatgggaccaaagctggttgccattacattgggagaacagggcgttcttatggcaacaaaaagtagaaaagaaatcatcaaagcatttcagacacatgcggtcgatacgaccggagcaggggattctttctggggaggcgtattatgcagtattctttctataaataagcccgtagaaaagatggaatgggaagaaatcagaaagtgtgctgttttgggaaatgcagttgcaggattgtgtgtgcaaaagcgaggtggaatacctgcgattccgacgaaagaggcagtgtttgaatttatgcagaaataatgagtgtatgttgcaatactggtttctacagcagtttgtgatgtgctgtcataccttgtgaagtagtatctggaaaattgaggattccggcttgacttaatttaacatctcaaatataataattgcatacatcagaaaacgttcactcttcaccggatgagtggttaaagcgtctgggagcaaatcgtaggtgcagtaatttacactgtaagatttgtttccgggcgcttagttattttggaggatagatgcaatatgaataagaaaaaagaattattggtacagattatgtgggagcttgcgggaagcatcttttatgcaataggtatatataatttcgccttgcaggcagagtttcctatgacaggtttttcgggtatttcgattattttataccggctgtttaatatttccattggtttatcaacggtcctgcttaatattccggttgcgatactatgctgcaaattattgggcaggaaattttttgtcagctcaatacgatgcatgcttttgtcttcttttattgttgactatgttgcgccgttatttccggtgtatcagggcgacagactgcttgcagcattgtgcacaggtgtattttgcggaataggctatgccatgatttatacaagaaattcttcaacaggaggagctgattttatcatcatggctgtaaaagcattgaggcctcatttatcgatgggaaacatctcttttcctactgatgtcggaattattctggtgggaggacttttgtttcgggatattgacggaatgatttacggcatgatagtgaatatactgtctgcggttgttattgataaaatgatatacggtatgaattcaggcaaagtagcctttatagtcacaaaaaacggaaagagaatatgtgatgtgattgatgagtgcagtcagcgcggaagcactattcttaaggcacagggaggttacaagcaggacgatattcaggtggtaatgtgtgcatgcaacagtaaggaaatgtaccaggtgcgtaaatccgtaaaagatgcagacccggactcttttattgtggttgttgagtctcatgaggtgcacggagagggctttaaaatgacaaatattggagaagcagagaactgaaacatacctgaaacaaatatagtgtgaagattgtattttagcctgaaaaaagctatactaatatagtgatgtagcggttttatggctgaaattatatatttgggaggtaattacatgttagaaaactggattaaaccacaaattccggaggaggaagagctggatgagcgcctgcatgcagcacgctctaagctgtctgtgcttcagatgcagattaaggagcatggactgcctgtacttgtgctgtttgagggctggggtactgcaggaaagggcagtgtgctcggtaaggtaatcaagaatattgatccgcgatttttcaaggtcgcaaccatggacgagccgacagaggaggaaagacgcaagccttttttatatcggtattttgtaaagattccggcaaacgggaagcttgagtttcttgattcgggctggatggatgaggtagtaaaggatgtactgcacgacaagataggagagaaggagtacaagaagaaaattgaaagcgtgaagcgcttcgagcgacagctgactgacaatggttatcttgttatgaaatttttcttccaaatcagccggaaggaacaaaaaaagcgtattgaggtattaaaggagaataaggataccagatggcgtgtcagtggagatgaagactggcagaataagcattatgacaagtgtatgcatgtgtttgacagatatctgaatgatacaaattcgcctgcagatccttggtatatagttgatgcaaagaatagaaaatgggctgagcttcaggtgctggagacgctggttagtggaatagagacagcacttaaaaacagtaatcttgctgtgccgctgttacagaatgtgtttgcgcttgagaagattccaaagctttctgagatatcacttgacaaggaactatctgaggaagaatacaaaaaggagctcaaaaatctgcagtctaagcttagcgagctgcataacaggctatacaggcgaaagattcctgttgtcatagcatatgagggctgggatgcagcaggaaagggcggaaatataaagagaatcacagaggcgctggatccgagaggctttgaggtgcatccgattgcaagtccgctgccaaacgagaaagccagacactatctgtggagattttggaatcgtcttcctaagaccgggcatatagctatttttgacaggacatggtatggcagggttatggtagaaagactagagggcttttgcagcgagaatgaatggcagcgtgcctacaatgagattaatgaatttgaaaaggagctgtcagactggggtgctgtcatcataaagttctgggtgcagattgataaggatacacagctggctcgatttgaggaacgccagaatactccggaaaagcaatggaagattaccgatgaggactggagaaacagagaaaaatgggatctgtatgagactgctgtaaatgagatgctaaagaaaaccaataccacttacgcaccatggcatgtgcttgagtcaaacgacaagaaatatgcgagaatcaaggctcttaagattgtgattgatgcgattgaagctgctttggataataaaacagataaaaagtaaaaacagatgtatataaacagagatatgtaaaaagaagccggaataaatccggcttcttttaaagtgttggtaaattaatttgggtacaaaaaatgcgcctccaggggctcgaaccctgcacaccctgattaagagtcaggtgctctaccaaatgagctagaagcgcaaacatctgtgtgaatatctgtgtcacacggacaaatgatattatacacagggttttacaaaaatgcaagtactttttttgaaaaatttaaaaaattataaaaaagactttaaaacactaagtactccgttttcccagtaaggcgcacaggtgtgttttgcggctgcgataacttcctggcgggcatttgagacggcgtagcttataccggcattttgaagcatctcaatatcattcagattgtcaccgaaacagcatacttcgtccgcaagcaggtcgaatctgtctatgaggtatgagagtgcagtccatttgctgacaccctttgcgttgcagtctacccattccttgccggcggctgccaggtgagcttttttattccatgccggaatgaaaaccggtgtacacagctcttcgcatttgtcgggatgaaagacagtgaatttgatgatgtcatttctgtcaagccttgtgatgtcatcaacctcacgcatctcaaagccgtatgaatcacgaagcaggtgaaagaccgggctgccaccatcctctgcaaagcagaaatcaggagtagcagcaaagtaatcgcatgcaggcagctcatcgcggaccatccggcacatgcccttccatatatcttcgtccataggataggttttcaggatttcctttggagtgcgcacgactgttcctccgtctgttatatacaaaagcttgtgctttatcggagcaaacagcttaaattcgcttgaaaactgtctgccggaacagactacaaatattattcctttgtctatgagcctgtcgatgacagacatgtactcaggatctatgagcagtgagccgtcctttacaagtgttccgtctatatctgttgctattagttttatcattatttatctccccagggcgtatatcttttgaatattcaactatatcattataagaaattataatctcatatgcaagggacttatagtgtatttattactgtttgtgaaagaaaaaacagaacaaaaaaacagaatatattgaaagtttcctgctcatattgtatcatagtaatactggcttcatcttcaatgcgttgaagcaatgaaaactaaggggacgatatttactatgatagtagcacttattgaaaaagtttattctttcttgtggggagatctgatacacattccactgcccggcggtgggagcgtgggaatctcactgctcataattcttttgattccgacaggaatttatttcactgtaaggacaagacttttaccaatcagaatgtttccggacatgataaaggcgctgacaggtaaaaaggaaaataaggatagcctgtccacgttccagacactcattgtctctacggcgacgagagtgggcatgggtaatctggttggtgttgtggctgccatatcagtgggaggcgcaggtgcggttttctggatgtggataacagccattataggttcatccacggcttttgtggaggctacactggcacagcttcacaaggagccggatccattgtactcaggctatcgtggaggtccggcgtattacatacaccactactttgaggataaatcaggcaaaaagaaaaaacatgttattatagctgttttgtttgctatatccggactaatctgctggtgtggcataagtcaggtgatcagcaattctgtcacatcatcctttgaaaatgcatttggtgtaccacctatttatactacaataatcctggtggcagtggctgctgtaatagtgcttaggaaaaatgctacggtaaaggtgcttgacatagttgttcctatcatggcggtgtgctattttgccataaccatttttatcataattaaaaatataggcatgatgccatcggttttttcaaggatatttgaggaagccttcggtatcaggcaggtggctgcgggaggctttggagcggtgctcatgaatggtgtaaagagaggtcttttttcaaatgaggcaggctcgggctcagctccatgcgctgcagcggcggcagagtgcgatactcctgtaaaggcaggactgacgcaggcgctcggtgtatttatagatacgatagtgatttgcagctgtacggcaatgatcatgctcactgcaccggagaatatagtggcagggaaagagggcatggatttattacagtcagctatgaggtatcatcttggagattttggagttatttttatagcagtcacattgtttttattcagcttttccaccttccttggtatacttttttatgcaaggagtaatgttgcgtacctgtttggggataactggatttcacagaccatgtacaaggtgctggctcttgttatgctgtttgtaggcggtatcgcggcatacacatttgtctgggatctcggagatgtaggaatcggccttatgactatattcaatacaggtattctctatctgatgggtggacaggcaataaaggagctgcgagtctttgaggagagtaataaagcacaaagcaatagtcaatgctcacagcagggggataacgtaacgcaataacaataggagatatataaatatgaaaagagaatcatttaaatcacgtctgggatttatactggtaagtgcaggatgcgctataggcataggcaatgtatggcgttttccgtatgtgacaggtcaaaacggtggcggtatttttgtactgttttaccttatatttctggtatgcatgggacttccggtgcttacgatggagcttgctgtaggccgagccagcagaaaaagtgctgtgatgagctacaaggctcttgagaaagagggcagtaaatggcatattcacggatggatagccatgcttggctgctacatgctcatgatgtattacacaacagtctcaggctggatggttgcgtatttctttaaattcctaaagggagattttacatcaggcatgaatactgatgacacggcagctgcatttggaaacatgcttgcagaccccaagcagatggctttctggatgatagttacggttgtgcttggctttttggtgtgcagccgtggtctgcagaatgggctcgagaaaatcagtaaatttatgatgagtgctctgctcttgcttatcattgtccttgcggtgcacagtatcacactttcaggggctttggaaggagtgaaattctatcttgttccaaatctggatgcggtctctgaaattggaataaagaatgtaataacagcagccatgaatcaggcgttttttacgctgagtctgggtgtggccgcaatggagatattcggcagctatatgggaaaggattgcactcttgcaggtgagggtgccaaaatatgtgctcttgatacatttgtggctataatgtcaggccttatcattttcccggcttgcttcagctatggggtggaggtagacgcaggaccaagccttatctttatcactttgccaaatgtgtttgtaaatatgcagggaggccgcatatggggctgtcttttcttcttgtttatgacctttgccagcttttcaaccgttattgcggtatttgagaatatcatgtcgtttgccattgatatgtttggctggtccagaaacaaggctgcgctaataaatggtgtgataatacttattgcaagtatgccttgtgtacttggatacaatgtgtggagcaatctgcacctcataggaggcagggatgtgcttgacagcgaggactttatggtaagcaatctgcttctcccgattggctcactggtttatctgcttttttgtgtgacaaagtggggctggggctttgataagtatatagatgaggcaaatacaggatcaggacttaagatttcaaggaagcttaagccgtattttcagttcatactgccgcttttaattttgtttatttttatccagggattgatatagttacgtattttttggaaatcagacaggagagtgtaaaatatgttagatcagaatacctttatagagacagtgcagagcgtggccgagattatcaggacatcagcggagcctattggcagagatgaaatcatgtcttattttaaggatatggagcttaataaggcgcaggaggatatggtatttgaatttctcatcacaccacatgagcaggagaatgagagtgcaggtgattatgaggatgaatcacaggacgaattacatggggatgaatcgtctgaaaatgctgcattaaacaatgtaatatactcagaaggagattcgatggatgccatagcaggtggaaagaataataaggccaagcaggataatgaagctgagcctgacatagatgaggatagccttatcccggattcacctatgtttaggatgtatcttgaggagcttgaagagatacctgattacacaaaggccgagcaggacgatatgtacaaaaagctgctcgcaggtgatgagagtgtgatacacactatatcaaatttctggctcaaaagtgtgcttgccatggcaaagaagcttgccgttacatcagagggctttgaggacgtagtacaggagggaaacatgggacttttcatgtgccttactgagctctgcggctgcggggatgagatagatgtggaaaaagagcttttggatgctatagaggagtctatgaaagagtgtatcagggagcagaccggtgaggatgagagcgagaatactgtggtaggaaaggtttcattggtaaaccgtgcagtggagaaactaaaatccgataagggtttcgagccgagccttagtgagctttcaggctacaccggcgtggatgaggaggagcttgaaaagcttctggagcttatcaaaaaggctgatgtggagaaaaataaacaggacagtaaataatctgtggcatttgtagatttgtgtcatatattaaaccatacctgaatatatgaaaggatggaaaatatatggcacgatttactaatcaggcacagcttcgttatggcaacaatgtagccaattcaaatatagcagtcggagaaatactggaggtgctttctgctacgaaaacagcagtcaaaaacacctacaatcaaaacgatacaataacctatgtggtgagtatcgtaaactccggaaataccgcgataaacggtctgacactttctgacaatctaggtgcttatacctttaacaccaacactcttgtaccattaacctatgtgaataacaccgcaaaatactatacaaacggcacactccaggcagcgcctgcagtaacccagggaccgcctcttagcatcacaggcataagtgtaccggcaggtggcaatgcaactgtcatctatgaggcagcgttaaatgagtatgctcctcttggcatagaggctgcagtcacaaacactgctacagttagtggcaccggaatcactccggtcacagcagcagagacagtaaatgccgaggctgcgccaaatcttgcaattactaagtcagtaagccctgttcctgtgacggaaaacggtacactgacctataccttcaggattcaaaactacggaagcgttgcggcaaccaataccacaggcgtggttataacagacacatttgctccggttttgaacaatcttacagccgcattaaacggcacagcctggactgcagctacagattacacttacaatgagacgacaggcacattttcgagcacggcaggtgcaatcactgttccggctgcaacctatacacaggatagcacaacaggagcgtgggttgtcacaccgggtgagagcacacttgtcatcaccggaacagtgtagcagcagagatgattaattttaagaattgtttaatttaagtgataaaagttgaaatattgatactaaatatgtaaaatatatatagctatttatgaataagatgatgaagatgatcatcggcagtttaaaatgattaaccgggggataagacaaatgaataatgcacagttagtgatagacgaagtaaaaaaggcagtaaagggcaaggatgattgtatcatcaaggcatttgctgcctttttggcaggtggacatatactgcttgaggatgtgccgggagtgggaaagactacgcttgcagtagctttttcaagggctatggcgcttgtgaatcacagagtacagttcactccggatgtgctgcctgctgatatacttggcttttcgatgtatcagaagcagaccggagagtttgtgtaccgcgagggtgccgtgatgtgtaatctgtttctggcagatgagattaacagaacaagtcccaaaacacagtctgcgctcttggaggttatggaggaaggaaatgtcactgtggatggaataagcaggaaggtcccggagccgtttatagtgatggccactcaaaatccaaagggcagcgccggtacacagctgttgccggagtcacagcttgacaggtttatgatatgtatgagcatgggatatccttcacatgatgcagaggtggatatcgcaaagggcaaaagtgtgaaggctgatgagtatacgataaagcctgttatgaatgcacagggacttgttgagatgcagggagaggttgagcaggtgtttatacatgacagtatttattcgtacattgtggatttggttgatgcgacaaggacaagtccgtacattgagcttggagtgagtccgagaggtacgattgcgtgtgttaggatggcaaaggcatatgcgtatctgagtgggcgaagctatgtcataccatctgatgtggtttctgtatttgcggatgtgacaaagcacagaatcgtgctaaataccaaggcgagagtatcacacgtatcagagctttcagtgatagatgagatactaaaggctgtaaaacagccgacaacttatgtgaaaaaggcaggtaatcgtgattagttttttgataggaataattactgcggcaatagttttttatatgtcgatgatatacggtaatgctgcgctggcactgcttggctgctttatgtgtgtgtttatggtgctgacatttatagcattgcttgtaaaggcgcaccgggcggtggcagctataaacattccgatagctatcgccacacagggcgagagtatcagggtgagtctttcctgccggctgaaggaggcaggcttttatggtgtaaaataccgtgtaacggtgaaaaataatttatccggcgaaaaaagtacaaaatggctgtcaggaggcagtgattttttgtacagcgtgaacctgtgcggcaattatgaatttgagcttgtaaggataaagctatatgatttttcgaggcttttttatgtcacgaaaagagttaaaaaatatgcaaatgttgaggtgatgccgcagattgatgagattcctgtgaggataacggacagagtaagaaatttctttggggattctgatatctatgatgatttaagaccgggatatgatccgtcggagctgtttgatgtcagagagtttcaaaatggtgacaggctgcagagtgtgcactggaagctttctgcaaggactgatgagctgatggtaaaggagaacagcctgccaaaggcatgtgcggtggccatagtagcagatttaaggggaataaagaagggcagacaggcggatgcttttatgaagcttcttgtctcactttccttttcgcttatggatcaaaaatgctctcattatgtggcgtggtatgataacgccataaacgatattgtgagagccagagtggatgacgaggagggcttttacatatttttgaacagttttcttaaaataaagccggatacaaaaaatgatgcgctttttttgtatgaggaaaagtaccgggcagaaaagcttgtgtgtctgcttagcgtggacggaagacttcagataaaaaggggagaggagatagttggcagagcggatgaaaaaaacgagattgtcatttaggaaaagcagatggcagagatctgacgcaaatgagataaagcctgattataataatgcatttacagtgcttggtgtcctgcttactgagcttgccaatgcagctgccgcagtacttcttacggtgtgtgcagtgtctgttgtgaatacgaccgtttcacatgtgagatgcccatattatgtgtatgtgtggctgtttattttttcggtgataagcggctttataaacaggcttacatcgcttgacacaagaaaatgggtgcgccatgcgataaatacggggctgctgcttgtatttctgcttggagtgtttattgcaaactggcaggctgcagagcatataaaagacggctttttgtatgtaaagggcaggtatcttgagataataaatgtgtactatggcacttcgtttgtctgtccaaagggcgataaagcctttgcgggggcatttgttggctttgtgtcgtttatagttatgcttttgctggtgacactggcggttcaaattaaaagaagacgcatgctcacattatttccaacgcttatgcttgcggtacagctgtgcataggcaaaagcccaagtgtcagcgaggttgttatgctcacgctgtgtacactctggtgtcttatcgcagatggcaacgcacgcacagtggcaggatatgatgcaaatggcagtgcacagggcaatgaggttttaaggatagcgtcgtcttttttatatatggcagcagtgtcagcaatacttttcatatgtgtatttacatttaaacctcttgctgatacgcttgccgataaaaagccgcagatgcttgcctttcaaaaagatttggagggcagcgtaaaatcattcttcagcgtggggattgatttacaggatggcacggttagtaatcactatccaagctacagtgaaaaaacagtgatgacggtagaagcaaagtcaggagcgccttctaatatttatctgagaagcttctacggtgatacctatgagaatggcagatggattaaaaagtctgatttttccgggatggaaaaagagtatcatgatgcttcaaggatgacagcatggcagaatgcaatcggattagccacgctgctcgatggctattatgatgatgagaccaatccggccacagaaaagtatacaatcacgatggagaagctttccaccaaatacgcctatttaccgtactgtatagacacatacagtatagatgccaagggtgatatagattttgacgaagacttttttatcacaaaggataaagggacaaagactatcgaggtgtcggcgtgtcccggctttttcgatggtagtctggaaacgtccagccttgagcccgagcagcctcttgaggtcaacaatgatttctatgcggcatacaataattatgtaatggaaaactatactgcaaagcagggtggtgacgggattgttgcggaagatgcaaagtggcttcttaggacaggacagctcacaagcaatatgatgtacacaggctatataagagaaaatgatgccaacaggattgcggcagcacagttggtgcagcagtttctgacatcgaagaattttaagtacagcaaaaatcctccttccacaggcggtaaggatgtagttgaaaatttcctctcaaatagcagacagggcttttgtgtgcattttgcatcggctggcacgatgatactcagacagatgggcgttccatgccgttatgtaagcggatattgtgcaaaggaggacagcttcaaatccggtgaaaatgatgaggatatatgtgaggtgaaggattcgcagtcgcatgcctgggttgaaatatatctggatgatttcggatggattccagtggagatgacaccgggatattttgagtatgtgacaggtgagaatccgtttgactatattggtgtcaacggaaagaaaacaaacaccggtgctgcttataatgatagtgagcatatgaatgatactgcggcagatgaagataaactggatgaagatgcagcaaatgaagatacaaaaaatacagatgcagaaaatgatgacacagcaaaagatgatacatcaaaagctgcagcaaacagtacatcaggtgatggcagtgagaaggcttatggttcacagtcaggtgcggataaacgtacagatgctcagaactcaaaaacgagacctcatataccaccggtgattttaaaaacctcactctgtgtgatttttctgactgcacttacagccatcatagtttatatcaaaaggcgaagaaatattttgtgggaagcaagacttgcaaaaagggtgaaaaaaggccgttacagcagggcagcaataatgataaacaaccgcatctacaaaggactgggacatccttcaaagaacaggacagatgagctttatctggctaacctgaaggaaaaatactgcggaccggattattgcggaatccactgggacgagtacatgcgcatcatacaaaaggctgtgtattcatcagaggacatcacagaggaagaatgctttatgatagtggaaacatggaggcgtctggagaaaaaagacattagacataattcacaaaaaaacatgtataaaaacagcatgattaacaaaaaataaattcgtggggaaaattgtgttgaaatgataaagcttctgtgatataaactttaacagacgtgttacttttagggaggcatttgtcgtacataacttttaacagggttagtgtatgataggtgcctccttttttgtcgttggagcaataaaagagttacaggtgcaaatcaatacataccctgcatttataggaggaaaagctcatgaaagacaaaatttttggtgtcctgcagagagtaggacgaagcttcatgcttccaatcgcaatccttccggtagcaggcttgcttttaggactcggaagctcatttaccaacaccacaacaattgagacctacggtttacagtggctgctgggagataagactatactccatgcacttcttgtaatcatgaatgcggtcggaagtgccatattcgataaccttccgctcatttttgcggtcggagtagcaatcggaatggcaaagaaggaaaaagaggtgtcagcactttcggcagtcatagcatactttgttatgaatgtatcaatcaatgcgatgctcaagatttccggaaaaatccttgcagacggaagtattgcaaaggatgtgcttgatggaaccatcacatcagtatgtggtatccagtcattgcagatgggtgtgtttggcggaattatcgtaggactgggagtggcagcactgcacaaccgtttctacaagattgagctgccgaatgcattgtcatttttcggtggaacaagatttgtgcctatcatttcaacagtggcatatctttttgtaggaatcataatgtattttatctggcctactgtgcagaacggaatctatgcactcggcggagtagtgacaggaacaggatatttcggaacacttctctttggtatcataaagagagcacttattccattcggactgcaccatgtattttacatgccgttctggcagactgcagtcggtggaacgatggaggttgcaggacatatggttgagggtggacagaacatcttcttcgcacagcttgctgactctgcaaacatcgcacatttcagtgccgatgccacaagatatttctcgggagagttcattttcatgattttcggtcttccgggagcagcacttgcaatgtataaatgtgcaaagccggaaaagaaaaaacaggcaggaagccttttactttctgcaacacttgcatgtatgtttacaggaatcacagagcctcttgagttctcattccttttcgtagcaccggctctctttgcagtacaggtagtgctcgcaggaagcgcatacatgatagcacatattttaaacatcgctgtaggacttactttctcaggaggattacttgatttcttcctgtttggtatattgcagggtaatgaaaagacaagctggacgctcgtgattccggtgggaatagtatatttcttattgtattactttattttcagcttccttataaagaagtttgatttcaagactccgggccgtgaggatgacgatacagagacaaagctctacaccaaggcagatgtaaatgaaagaaatgctgctaaggatacaaaagcttctgacgacaaagcggctgtagacgagctctcgcagactatatcacgaggtctcggcggcaaagccaatatctcagatgtggactgctgtgcaacaaggcttcgtatcacagtaattgacccagaaaaggtaaacgatgcgcttcttaaatcaacaggagcatcaggagtcgtgcacaagggacagggcgtacagattatctatggaccaagagtaacagtgataaaatcagatctggaggattatcttgcgagcgtgacagaggaacactttgaggatgatgcagcagaaaataatacagcaggcgcagatgaagtgaagaatgaaaatgcagcttcggccactgattcaaaaacagaagattcaagcaccgcttcagataaagcacaggaagctgctgacaccaaagaaccgacaagcacagttatcatctcaagcccgatgacaggaatagcagcagacctctcaacagcgccggacgaggccttcgccggcaaaatgatgggtgacggagcagtagtcacacctgaggagggggtagttgtagcacctgaggatggaactgttttattcgtttttgatacaaagcatgctttgggatttacaaccgactcaggaattggtatgataatccatgtaggaatcgatacagtaaagctcgagggtaaaggctttgacgtacaggttgaggcaggatgccatgttaataagggcgatgtgctcatgaagcttgaccttgactacttaaaggcgaacgcaccatcagttaccactcctgtcatctgcacagagctaaaagataatcagaaaatccgcctcatcacagacggaccgattaaggcgggggagcctctctacgcagttgacacctacgagaagtaattcatactttatgataattgaattgtccggttatgttaataataaatagttcgtataaattatcaggagtacattaataaatgtcaggggaatgatatgtacagaatcacaaaggtcttaaatcataatacagtgcttgcggtaaaggacaagagcgcaagagaatatcttatagtcggaaagggtgtgggttttggaaagaaaattacacagtctgtcgagccaacggaagaggattcactgtatgagctgacccagacaagggacagaggtccggcaaaggatatagtaaaatccatcgagccggagtatctggagattgcaaacacactgctcgataatgcagagcatgagtttggtcatatagacagaagcatattgtttcctatggcagatcatatagcatttgctgtaaagcgtatggaaaacaaagaacagatcagcaatcctttaaacgatgacatccgtgtgatgttttatagggagtacaagatagctgagaatatacgccacatactaaaggataaaaaacaaattgatataattgatgatgagatcggctacattactcttcatattcatacatccttaaacaattcaaaggtatcggatgccatggagatggcggcagcagttcgaaaatgcgccacatttatagagaaaaagattggaaagcacatagatgtcactactatggcctacaaccgcctcatgaaccatatccgccacatggtatcaagagccgcgaccggagaaaaattaaaggttgatctcaatcagtttatcgagaaaaattatccggagtcattcgcactggcaggtgagatatgtaaggagcttggaaaggacttaaatcatgagtttctggacaatgagacaggctaccttgccatacatattgagcagattaagtgcgatgagatggtaagtgaataaaaaatgtgaaaaccttcctgcacattaggttatgtgtggggaggttttttcgtgaaaaagtactgtgatggaagaaatgaatggggatttgcgtaaaataatagatataacaaatggggatttgcgcaaaatatcagtttacacgagtggggattcgggatataatattaacaaagaggtgatttttatatggaaagacatgtttttaaacgtaaaatttataatgaaatacttgaatggaaaatcaaccgaagcgacaaatatgcccttcttgtgaagggtgccaggcgaaccggcaagtcgacgattgttgaagaatttgctaaaaatgaatttaaatcatatatcctgattgattttgcgcatacaagcaaggatattattgctttgtttgacgacacatatgagcttgatttcttttttttacagctacagcagttaaccggtgtgagattatatgaaaatgaatccgttataatatttgacgaggtccagcttttgccaaaagcaagacaggcaatcaagtatcttgttgctgatggccgatataaatatatagaaacaggttcattgatttcgataaaaaagaatacgatggatatattaataccaagtgaagagcataagatatctatgtatcctatggattttgaagagtttttgtgggcaatagatgacgaaatcacagcagagacgattaaactacttttaaaaaataaaaaagcagcaggaaatgcgatgcatagaaatttgatgcgtaaatttagattgtatatgctaatcggaggaatgcctcaggctattgaagcttatctggaacataataatcttcagattgtggatgaaacgaaaagggagattgttgagttatatgaagaggattttacaaaaatagatggaaccggactggcaggagatatatatgatgcaattccggcaagtcttagtaaaaatgcatcaagatatgtgttgtcaaaagcgagagaaggggtacgtgcaaaacaagtgagagatatattacctgatatactcagctcatatactgtaaatattgcatatcatgcaaacaaccccggggttggaatgtctctggaaaaggatatagacagatacaagctatttacatcagatgttggactgtttattacgcttgcatttaaggataaaaaatatacggataatataatctataataagctgttgtcagacaagctggaagcaaacctgggatatgtttatgaaaatgcggtagcacagatgttgacagcaaaaggaaacaatctgttttattacacaatgaaaagtgaaacttcaaatcatttgtacgagatagatttcctgctatcaaatggaactaaaattaatcctattgaagtgaaatccggaaattacagagagcataaatcattggatgcattttgtgagaaatttagcagccgaatcagagaaaaatatgttgttcatacaaaagactataaatgggagaatgggataaattatctgcctgtgtatatgataccatttattgaaggagaataaaggatttgctttagctgaaagtgttgataaaatcgtacgaaatacgtaaaataatggtacgaagaaaggaagtagcaaaatcattgtttggaatattgccaaaggaggcagatatagaagttgcaaaagcagaaaggcttggtgaaaaatagatgcggttgttgaaaagcttgatgatgagtatgttaaaattatgtacaaatcttccttaatgtggtacactatatagttgtatcaacaaacatccgatacacaaaatacatatgaaatcaatttaaaggagatatatataccatgaaactcggaatcgttgtaaattagccttttttcataaatctatatacctcaataaaagtccgtaaaaccgcatggttacaaggttttttgaaattgtaaattcataaaacttcatacaaaatcatatactttcatgccatttgggtgtagaaatgggtgtaaaaagatagtcgaaaaccagagtccaacgcattttatgtattgataaatgggcatacagatttctacggatagaaccatatagcatgatagaacagaagttaaaatattataatgtaccgcacaggcggcgttaccttatcccaacagggaaacaaggaacgccgctatttttttaccctcatgttacgcagtaggggcaaaaagagctttgctacataaggctttgcgggtgcggttttcacacagtaagggattgatacctaaaccctcaaaattgctgttctactgcgtaacaaatatgaagcaaaggagttgatgaagctatggcagttttccgcgtggagagaaacacaggatatacggttatgagtaaccaccatttacgcaataaggagctttccctaaaagcaaaagggctgttatcacaaatgctgtccttgccggaggattgggactatacccttgcaggactgtcctatatcaaccgggaaagtatcgacgctatccgcaccgctgtatgggagcttgaaaaagccggatatatcacaagacggcagggacgcgacgagaaaggtaaaatgaccgctatcgagtacaccatttacgaacagccacagcccccggcattggattgtccggtattggaaaatccaacagcggataacccgatattggaaaatccgacagcggataacccgacgttggaaaatccaatgcaattaaataaagatatacaaaag

SEQ ID NO: 1545 - DNA, 8557 bp, Unknown
  gut microbiota DNA sequence
aatatgatttgacaggatatgagagagaatcactctgggtaataacccaatggttggtgctacagtagcagttgccgtttctgttcagcaggcttcagatgagggcaaattctaaatagaaagcttgattttataggctttttggagagtctttggagaaatccgaaggctctctttttttatgtctactaagtctacgtgataatcctaggcaaaagtctacgagaagtctacagattttttgtagaacataaaattttggattgacatattttcacattacaggtaatataatattaaagacaggcaacttgagtgtctgccaagcggtaaagtaaggtgttgtgccagagagcagtgccttatgagctttataagggtttaacatttaccacaatctggctagaggttaatcctcgaaagaaaatgttagaagggctctgcttttgcagagcctttcttaatctaaagaagtagtggagaactgtaatgagaaatgttatagattgtataaatgcctttattccgctattatcgacagaatatgagcttgtgttgggcagaaaaggtgttgcagttacattaaattaaaataatatttttttacataagtcatttggactaacaatccagatggctattttttactcattaccaataatgctaaaaaggtattatcagaggcacaggagtaattttataccaagtgtgagcagataaagtcgcaggtatatgaggtgaaagagcagaaacagaggatttatttatagcattaatttattatggaacaagtttattgtttattgttataggaaattacctgccaaagattaagcagaacaatacgataggaatcataatcgtattgacattgcaggatgaagaaaactggaatgcaactcatagctttagtggaaggatatgggggacatcaggtattttatgtatgctatgcatattacatttgataaaatctgtgagtaaagaagcttgcataaaagctaagtaagttattaataaaattgtgtaatttatttctcatggaaattcatctcctttctgtttacgatgtcattatagaatacgaaaagaattattacttgtcaaaataacagaatatatagtcaaaagttgcttaatacagtgacaggttaaaatatcctgcaatactgtcattggtcagtttatttatacaatttaatattggaacattttacaactatgacacaagtatgcaacataataaacgaatgcttttgatagagtaatgatacacaatatcagttataaagaagcaggaggatagaaagtggacatgacacaaaacaaatgttgcagacatggggcaagtttacgtcgaaggagacgcaggcacagaaaaatactgcgttctgtcatattttcctgtagcatcatagcaggggctgtatttgtggctgttggaagccgtatgataacatccggcgatggcgggacaaataaatatgatgttgaagccggaaataatacatatgataatgctgttatagaaaatagcaaaatctctgaaaataataagatacaaaatgaacagtcaatgcttgatgatataatgaacagtacccaatatccaaaacagctaaaggaccttgctttgaagaatgaagaggcacttgagtttgtgtatgattatccggcggaacatgtgaaggaacacacaattgacttgacagaagaagcgtctatggatagtgttccgttatttgtgcagtgggataaacgctggggctatgaaaagtatagcggcaatttctttgcagcaagcggatgcggtcccactacactttcgatggtagtggtttatctgacgcacaatagggaggcatcacctattgcagtagcaaagtattcaaaggaagccggttacagtgtggatggttcaggaagttcatggacgcttataagtgaaggctgcaggcactacggcgtaaaagcaaagacagtggcgctggatgagagcagaatgaaagcagagcttgatgaaggacatcctattgtggtaaatgtaggaccgggagattttactgatacaggacattttatggttataacaggctatgatgatgaagggttttcaataaatgatccaaacagcattgaaaaaagtggcaaaaggtggttattcaaaaatatatcatctcagattagagctgtctggagtatgtatgtgtgagaatatatttgtataagtgccggtaaaacatcctattattgagttaaataatagggtgttttttacaactatgacacatctttatgctataataattctatcataatcatagaagaggagcagcttatgaccagtattctcatagtggaagatgacaacgacataaataatttaatatgcaacaccctgaaggcagagggatatcaatgcgaaagagcgtttgatggcaaggaaggggcggacaaaattgagcagaacagatatgatctgctgctgcttgatattatgcttcctgagataaatggttatgaattgcttgactatgtcagggaaattggggatactccggtcataataatatctgccatgggacaggtggatgaaaggatacgcgggcttcgtatgggcgcggatgattacatatgcaaaccatttcagataggggagctgcttgcgagagtggaaaccgtattaaggcgcactcagcgcatggcagagcgtctggaaatagaggatgtagctatagatcctaaatcacgtacagtgacaaaggcaggtgagcaggtagagctcacagtaaaggaatttgatctgttgtatgagcttatgaagaataagaatgttgcactcagcaggcgcaggctttatgaacttgtatggcaggaggagtataccggggagacaaggacactggactcacatgtacaaagactaaggaaaaagcttgattggaatgaaaagattgtcacagttttcaggattggctatcgtctggaggttcgcggatgaaatttttctataaaatgtttcttggaatgacagtgatactggctgttgcccttggaatgatagaatatgtgactctatcatattcactggagcatgcagtgaaaagggagcaggacagtgcactttcacagcatcagatgataaaatactcgattgaaactgtaatccttaatatgaagagtgaggatgtggataaggagcttacagatatgatgtcgcagtcggcaaaatccattgttggagatgaaggaggaatgtatcttgctgctgatgatggaaaaaggatatatgccaattcatgtaattatgagcaaaaggatataaaggtaaaggatggtacgcttacatacagtatagtgtcaaaagagaatactaaagataccggtgaaaaacaaagcggcagatatatccatgtcaaaagcagctttaaactgaatgataacaggtatattctgataacggaaagtgatattacaccggttttcgatgagtcaaaggagcttaggtatagatgcagcgtgtactacattgttatacttgctgttggtatgatggtcatattgatactttcctggatgattacaaagcctcttgccggattaacagccaccaccaaaaaatttgcagatggtgattatacagcaagaagtgatgtaaagacaaaggatgaaataggtgagcttgcaatggctttcaacgagcttgcgaaaaaccttgaaagcaaagtttatgaacttcagatggcggcaaagaaacaggaggattttactgcaaacttcgcacatgagctcaaaaccccaatgacatcaattatcggatatgccgataccctgtatcagaaaaaaatgtccgaggatgaggtgcacagtgctgccggagtcatactgaatgagggcatgaggcttgaagcattatcatttaagctgctggagcttatcactcttgataaaaatgatttcaggcttgaagagacaagaatatctgagattatagcagactgtgtggaaaccgcacatgaagcggcaagaaagcataatacagagattgtgtacagtgcggatgaggcatgggtgtggctggaatatgatctgtttaagaccatgcttcttaatctgatagacaatgcagtgaaatcaggaggcagcaaggtagatgtatcaggcagacttatttcgcacagtatttatcgtattgcagtttcggacaatggaagaggaataccgcctgaggatatagaacgcattacagaggctttttatatggttgacaagtcgaggtcaagaagtgagcatggagcagggcttgggcttgcacttgtatcaaggattgctaagctgcatgatacaaaaatccattatgagagtgagtcaggtaaaggaaccagggtgtattttgacatgaaagcggaggcattggatgagaagtaagcatttatcagtgcgcaaatgtattgataaaaaaccggataaaatcaagggaatagtgtgtatatgcattattctggcagttgtatgtgcgggaaatatgataccgaattatctgatttcacttaaagcagcaaaaattgccaaaacgagtactacgataagcaacgcagatataagcccctacagccactctatttcagctgaagagaggcttataaagatgatgtctctgatgcaggacaatgtaaatgagctgtggaatgggaaatatagtgagaaagggaaccgttggatactgagattacggtgggacaggcttatacggctattcagacttttctgaagggtgcctgtgagctgcagaagcagtcaggtattatgcagatgctcggtgaagacgatatagttatgctccaaagcctcgaaagtaactattcaaaggatacagacagcgaaacagaacagacatatgaagcagctccttggcaatatggtgcagcagttactttggatgatagtattgataacacaatgtcagattattttgtaacatcggatataagcaaggaattatcggcgtggatatttataatatcatttgaagatacgagaatgctggccgctgttgatgcggtgcttggagtaccgttttatattacatattattgtgcagatgtggatagtcctaaggcacaggctgcagtgatgagagatttatatgcaaagatatatggcagtgattattctatgggtgatccaaaagagtctgaatcaaaaatagattcttcctttgagacaaatataatagagaatttttattatgggaataattatacgcaaggggatgatgaatataccggttttgaaccttatgtatactcttgttcatcggacaagctgcagatggaatatcaggttattacaagaatccaaagatttgaaaaaaagggaaagcaagtgtcatcatataattcgcgtgttaatatatgtctgtactaaccggaccaaaaaagctctctgtgcaatgcacgggagctttttaaattgcatgcaagcatcaatgacaccttttgaccctcattttataatacagtaattataacagtatcatttagtgcatgatttgtacaatttattacattgctctttgcaagggttttgttatatcttagatacagcaaagcagttattgttctcggttttatatattaataattggaaagtgaggaaaaatatgaacgctgatatgaaatggcttgataatccggaagtgtttaaggtaaatcaattggaaccacatagtgatcattgctattatctggattattcagacatgaaaaaagaaaaaaatccattattacagtcattaaatggtcaatgggagtttgcttacagcaaaaatgtgatggaaagacctgttgatttttataaggaaacatttgatgcatccggattcgataaaattatggttcccggacatattgaactggctggatatgataaaatacgttacatcaacactatgtatccgtgggaaggaaaagagtaccacagaggagcatatagtatggaggcaaccggagcagaagaaggaatgttctcagaagcacagtacaatccggtaggctcttatatcaaatactttgatttggataagaacatgtgtggaaaaagaatccatatatgcttcgaaggtgtagaagaagctatgtatctgtggcttaatggtcagtttataggttatgcagaggacagcttcacaccttcagagtttgatctgacaccatatattaaggaaaagggaaatgttctggcagtgcaggtacataagatgagcacggcggcatttttagaggatcaggactttttcagattttttggaattttcagaaatgttactttgaaggcaattccggatgttcatctggaggatgtatggttcaaacctgtgttaaatcaagataatgaaagcggaagcgtatctgtcaacatgaaggtatccgctcctgacagtcagaatgtaactgctggctttattttaaaagacagagaagaaaatatattagtagagaagtcattacagttaaataaagaaaacgaccatttggaaggcacgatttgtgttgacttggaaagtgtcaggctgtgggataatcataatccatatttataccatgcttatgttgagcttaaagcagaggatggttcactggccgaggtaattccttatgatatcggtttcagaagaatagagattatagataaagtagtctatttgaatggaaaacgtcttgttatcacgggagtaaaccgtcatgagtggaatgcaagaacaggaagatgcattggtatagaagacatgaaggcagatatatcatgtatgttaagaaacaatattaattctgtgcgtacctgtcactatcctgaccagataccatggtactatatgtgcgacgatgcaggtatttatgtgatggcagaaacaaatcttgagagccatggctcattccaaaaacttggggcaatcgaaccgtcatgcaatgtaccgggatctattccacagtggagagatgcagtgcttgagcgtgcaaaaaacaatttcgaaacttttaaaaaccatacatccatccttttctggtcattaggaaatgaatcctatgcaggagacgacattgaggcaatgaacgtttattttgccgaaaagaaggatggaagattagttcattatgaaagcgcttattataatagggcatatgaggatactatttctgattttgagaccagaatgtatgcaaaaccggaggatgtagaggaatacttgaataacagtccgaaaaaaccgtatattttatgcgaattcatgcatgatatgggaaattcaatgggtggacttggctcttatatgaagctgattgacaaatacgatatgtatcatggcggatttatatgggattttattgaccaggcaattatggtaaaagattccgttacaggaaaagatgttttacgctatggcggagattttgatgataaaccggcagactatgaattctcagcaaatggaattgtatttgctgacaggaaagaaaaaccggcaatgcaggaagtgaggtattactatggcttatacagataaattaagagtggtctatggtgactatacattaggtgtacatggtgaaggctttgattatattttctcttatgcacagggtggactggaatctatcgttaaaaatggatatgagtggctgtatcgttgcccaaagcctactttctggagagcgttgacagataatgacaggggaagcaagttccatattaaaagcggaagctggctttcagcagatatgtttattgactgtaagggaatacaggtgatcatggatggcaaggagcaaaaacaatatgcacctgataataacagctatggcggtgatatttatgctgatgaaattattgtaaaatatacatacgagaccataacaactccggcgacaactgttcttgtgagctatagcgttgatgcgtccggaaagattcgcgtggatgtacattataatggagtacaggggctccctgaatttcctgtatttggaatgagatttattatgccaacattggctgacaaatatttatataagggactctccggggaaacatatcctgacagaaaagcaggtgcacaagaaggcgtctatgagataggtgatctgagtcttacacaatatcttgttccgcaggaatgtggtatgagaatggatacagagtggcttgaaattacaagacatacggctcttgataacagcaggacagatagctcgtcacagacactgcgcattgaaaagaatgatgaaaaatttgcattttcttgtctgccttataccgcatctgagattgaaaacgctcttcaccatgaagaactgccaccggcaagaagaactgttttatgcatatatggcgcagtaagaggtgttggaggtatcgacagctggggaactgatgtggaagaggattatcgtatcagtgcggagactgataaggattattcttttacaatctgttagtcattcattaaaaagataagtataggaaaaaattggcattataatattgcttttgtcttttt

SEQ ID NO: 1546 - DNA, 4271 bp, Unknown
  gut microbiota DNA sequence
cgactgaagtatagtggattattgtatccgacaatgcctgcaatctcgtttatagagtaggatgtcgtttcaagtagcacctgtgcgtttgtcatccttagtgctgtgagaaattgtactggtgtattaccggtatatttccgaaagctcctgataaaccagcttatgctcataccaattgatgaagcatattcctccacgttaatagagcggttgtagtttgtattgaaatatgtaattgctgtatccatctggctgtcaaggaattcatttctgattacatgctcagttgttattttacggttaaatataatcaaaaggtgtcgtagcaaaagcatgagcatttcctcataattgtcctgacatctttgaagctctgtaataatccttttgaaaacctgttcatattcaagagatgttccaacattaaagactcttttattgtctgtaaatccgtattttcttaaagtgttttttacgtcgcttccggtaaagtgaagccaatatatctgagtcttatccttaccataaaattcatatttttgaagctcttttgggcgaaataacactatatgtcctgctggaatgattgtctcattttcaggattgtcaaagtggaaatgaacaagaccggatgatatgtatataatctggtaatcaagtcttccccttggcctgtaagtaggcatcttaggatgctgtgacaggcgataggttccgcagcttcctacaatcagagggcggcttttatctttaaaatctttatgtgaatgattcaaatatcccgtgttaatatacattacacacctccattcgaattatagcattttatgcatgctttgtctatttgcatttatggacaaaatgtttagagcatgatattgtgtattgattacgtttcaaatggaattgagtcaaatagctgtgaaactgtagtgtttgaaaagtatcattttgtgcatattacagcctattatgtttatagacaaaatttgcacaaatatataaaattagtatagctgttaaagataaaacaaagtaattaattggaggtttttcatggaagaaaagacgtacttaaagtggtacaacaaaattggttatggttccggtgatattgcaggaaatgtagtatatgcattcctgacatcctttgttatggtatatcttacagatactataggactcgcatcaggaatcgttggaacattaatcgcagcatctaaattatttgatggttttacagatgttttctttgggtcacttattgataaaacacatacaaagcttggaaaagcaaggccatggatgatttatggctatataggttgtgctttgacacttgtagcagtttttgcaattcctacaagctggggcaggactgctcagtatgcatggttctttatagcctatacattattgaatggtgtattttatacagcaaataatattgcatattctgcacttacttcgctggtaacaaagaacagcaaagagcgtgtacagatgggctcttaccgttttatttttgccttttcaaccagtcttataattcagtctataacagttgcatttgttgatgtatgcggtggaggtgctgctgcatggagatttgtagctattatttatgctttgataggccttgtagtaaatacaatttcaggattgtcggttaaggagcttccggaagaggagcttaactccggaatagagaacgatgaagaaaagaagtatggtcttgttcaggcatttaagctgcttgttaagaataagtactatatgatgatttgtggaacttatattttgcagcagttatacagtgctatgatcggggcaggtatttattattgtacatgggttcttaagaataaaaatctgtttggtgtatttgcatgggctgtaaatattcctcttataatagcacttattttcacaccaactcttgttggaaagtggaaaggaatgtataagcttaataaacgtggatatattctggctacgatagcaagagcacttgtgattgtagcaggatacatgggaagcgttccactgatgatgctgtttactgcagttgcagcattaggacagggaccttggcagggagacatgaatgcagtaattgccgagtgctctgagtatacttacctgactcagggaaagcgagtagatggaactatgtattcatgcacatcacttggaatcaaaattggtggtggaattggaacagctattgtaggatggctgcttgaaatcagtggttatgtaggtacaaatgcgactcagccggcatctgcaattactatgcttcaggtaatgtatttatggttaccatttgtatttgagattcttattacaattcttctttcaaagatgaatgtagaagctgcaaatgaaaagcttagaagagaaaaaggaattgaataattatcgtataatataggagagatgatctgagtgcatttaacgtatgaaaatacaaatgaagagattattgcagtaaagcggaaaccacggcaccagccaccacatctgcataatgcaatggaaattgtatgcgttacgaaaggaacattagagcttggtgtaggacaggagctgtatcacatggaaacaggtgatataggagtagtatttcctgatgttatacatcattatcaggtgttttcatcagaagtcaatgaggcggtttttattaatgctccacaaatgatttttggtagatttgaaaatgtactgcggaataatgctccacaatatcctgttataaaaagtgatgttattccggatgaagtgtacagagcagtggaatccataatagatactgggcagaatgatatatgggttgttcaagcttatttgcagattatacttgcaagatgtattccgatgatgaaattggtggaaaagagcaaaattggcagcgatgatataatataccgtaccgtatcatatatttctgccaattttaataagagtatatcgcttgatggaatggcacatgaccttggcgtgagcaaattttcattatcaagattgttttcaaagacattccatagcagttttaatcaatatgtgaatgaggcgcgtctggggtatgcctgtcagagaattgaaactacagatgataccctgacagaaatctcgatggacagtggttttggaagtcttagaacctttaatcgtgtttttaaagaaaaatatagattgacaccaagcgagtatagaaataaattacaaaaatgatatttgtatataacaatggagactatgttggaacgttaaagaagtagtatatttgactaaaaagctctctgtgcaatgcacaggagcttttttatatgtagacctctatttatttgtgctgtctgcatcaattacagactgaatctgcttcataagggcatcatagttgtccttgttatcaattccgccgagcattggttcgcctacaatattgccatttctgtcaacaagtatagttgttggaaatgccatgatttctgaggcatatttaccggcagcgctagaagagtcaattgacagattacgatatttgacaccctggctttcaagaacagaggcagcctctttgatggctgttttattgccatcgaaggtctcagtgttgatgccaacaacttctccgcccattgatttgatagcatcatttaattcgttaagcttggataactcagcgacacatggtttgcagccggtaaaccagaaattgacgactgttactgcattaccggaaaacaggctgtcatccaccttatttccatcaaaatcctcaccggaaaaatcactgaatacagatgaggctttagagctgtccttcttgttatcgtctgatgatttatttttgttttcaagctctgctatctgttcctcgatttttcgtatggtttcaatatcctcattaagtgttttaagctcatcgtctgtgaatgaatccttgtttgattctacggtaccggcaagataatcagcataatttccgtttggatcggcgtcacttttgttcatcatgccaaatgccttgttccacacatcagcgtgatctgcaaaaagctgattttcctgctgatataaatcatcaagcctggaatctgatttgccggatgtttctgagccggcttcagtctgagtgttcttagaatctgtgttggaagattgctttccaccgcatgctgtaagtgataatgctatgcagagtgtaaaaatagaaataaatgataatttgtttttcatgagtaatttctcctttaaaa

SEQ ID NO: 1547 - DNA, 3602 bp, Unknown
  gut microbiota DNA sequence
aaaaggaatcatatagaaggggagagctgtatatttcaaagattatagatgaggagatgaaaaaagatgatttacgcatatgacaaggtttatcttcgaattgcacagcgaagtcttggggagatgcttagttatgcagtgtatgatctcggatatgagctggaggattattataaaagatttttgcagtctgaatatagtatacgcttttcaaaaggtgatttatttgtgataaccgggatgtcgggcgctgaacttgcgataagggtattagatatacctgatgatgatataatcatgccttcgtacaatacagctaaaagccaggaatattggacaggatggattttggcatattaccaatgggagaatggcaaaacctttgaaatgattgataaagagatacctatttgtaaaatcagaaatatgtataatccttatcatgagatggatatttcatctgcgattttgaaattgagagagatgagtcaggtatcaagagcggagacatatcttaaaaaactacgcaaaagggctggtatcagtcagagcgttcttgcagaagaaacaggcattcctgtaaaaacaattcagcagtatgaacagcgcaggaaggatataaataaggcacaggtcgaatatgttgtcaggctgtcaaaggcgctgtgctgtgaaccgcaggatattttggaggaacagtcctcggtcgtttagaccggggactgttagtatctatagattttatactctcatcatccctgacataatgcatcccccggcggctccacattccatgacctcagcaagtcgcggaacactaatgtctggcatagcatcataagtggatggtgcatcggaagtagtgctgtcacagcttgaagcaatattaatgccgccgattgcataaaccggtatcccaaccgcatcacagacatttttgaggaaatcaagtccgcgcgggggcaatccttttttgcagtcggttgcaaaaatatgtcctgccgtcatatatgtggcaccaagctgttcggcttttatggcatcttctacagaatggacagaggttccgataaccttgaagaattgttgataattgtcagtgctttttgacatacctgtggatatattgccggacacattttttttgacataagcttcaaggattggcaatggcagatgtatatacggatgctcaagctccattgctacatttataaagctgtgcagcatgcactgcacatcatattttttacacagagcaatcacatcgcgtgccagagacagatattctgcctccggcatatccttttccctgagcacaattgcatgaggatgaagcttacagacgcgctcgagctgttccatgaatgggcggtggcacaggtgtctgtttgtgatagcgattatattatcactctgtaaagcatgtcttgagttttcatataagagtttttcttcattcatattcgcacctacacgtaaatatagtcgctcatcaccggctgtaaaccattgtcgagcagtgcattaaatacttcatccacgcttctgccatcagagatttcaaactggtcatcgcccttgtcctctatatcgtccacatggcttccgattccggtgctgacaccggctgaaatcttggtggcggcgatatttacgagattgtcacgcacacgcgctacctctctagtagatatggtgatgcttgcaaatggcatgaagagcctgtaagcgcataccacctgaaggagctgtgtctcgtggacatcctttggattgatacggtcattgtttatgatagggcacagacgagggcatgagaatgcaatctcagctcttggatattttttctggagcaggtatgcgtgatatccggtggcaagcgcatccttcctgaaatcatcgagacctaaaagtgcggcaaagccgacacctctcataccgcccttaagagcacgctcctgtgcatttacacggtaagggaaaattctcttgtgtccggcaaggtggagagtctcgtatttgtcagagttgtaggtctcctggaaaacggtcacatagtcagcaccgcactcgtgcaggtatgcgtactcgtcagagttcataggataaacctcaagacctataaccttgaaatatttgcgggcaattttgcatgcctctccaatgtattcgacgtctgacattttcttgctctcaccggtgagaatcaggatttcctgaagaccggttttggcgattgcagccatttccttttcgatttctgaggcattcagctttgcgcggttgattttattgtgacagttgaaaccacagtagatacagtagttttcgcagtagtttgatatgtaaagcggtgtaaacatgcatacgctgttgccgaagtgctttctggtctcaagctgtgcagcctgtgcgatttcctcaataaatggctgtgcagcaggcgagagcagagccttgaaatcctccaatgtgcggtattcgtgggagagcgccgcgcgtacatcggctgcggtgtattggtcgtagtcgtaggcatccatttcggcaacaaccctgtccatgatatcggagtcaagcacctccatatcaggcagatatttcatatggtctattctgttttttttcatgtcctcgaggattacttcgtttacaatgctgtcgttgaagtggtcatcgtgggagatatttgcattgatatctttgtcatttgttatatttgtatcgttagtcattatgtgttcccttcaaaagcttattatcatataatcgattagtcgcgcagatatcctgtcagaggagatgatgcgctggctcctttggtcagagtgcgtccgagtcctgacagataagccattcttccggcctcgatagcctttttaaatgcctctgccattatctcaacatcaccggctgttgcaacagcggtgtttgccatgactgcggcagcacccatttccatagcctcgcatgcctgtgaaggacggcctatgcctgcatccacgatgataggcaggtcgatttcgtcaatcagaatctggataaattcctttgtgcagatacccttgtttgagccgattggcgcaccaagaggcatgatgcaggcagcgccggcgtttgcaaggtctcttgccacgttgaggtcaggatacatgtaaggcattacgacaaagccctcctttgcgagaatctctgtagcctttattgtctcaaagttgtccggaagcagatatttactgtcgcgcatgatttcaatttttacgaaatctccacagcccagctcgcgggacaaacgtgcgattcttacagcctcatcggcatttctggcgcctgatgtgtttggaagcagtgtgacattgtccggaatatagtcgaggatgtttgccagtcctccatcgtttgcacggcgcagagccagtgtgataatctgtgcatcagccttctcaatgcaggcctttaccaggtcgagtgaaaactttcccgaaccgagaatgaaacgtgaggtaaactcatgacctcctaaaactaatttgtcatttgctaaatctatatttttattcatgatgaactccttttggtgttatgtgtattaaaataag

SEQ ID NO: 1548 - DNA, 1313 bp, Unknown
  gut microbiota DNA sequence
ggcagaaataattatataataatagctccatccaatgcaatagcccaaatgtcatgaaaaaaagacccaaaaagagagcgggccggcgaatgggaagttcgctggcccagatttacactaggagcaaagtttatactttgcggagataaaatatgtttttcgtggcctttcatgttgtcgcggccacgctatattctgatttgcttataccgctgccagcttctttccaagctcctcgcaggctgtctttgcatcatcgtccggtgcatcctggcagataacaccctcgccgcctaccactgtagctccggctgctgtcattcgctctacccagtcgcgcatccactcgccatcgccccatccgtatgaaccgaacagaccgattgtcttgcctgccacgcagccctcaagctctgtgacaaacggttccatctcgccctcctcaagtacctctgcacccattgcagggcatccgagtgcgaatgctgtctctgatttaagctcatctattgaagcactgcttacgaatacgatttctgcttcctttccggcatctgtgacgccttttgcaactgcctctgccattgctgctgtattgcctgactgtgaccaataaactacactgattttgctcattttaattcctcctataccgcaatctgctgcggttcttctttatatatttccagtatcagcctcatatctatatcctcggccaatagctgtatgacactttccttcgccttttcaaaatcctcaaacatcttctttttgagtggtacgttgcggtacaccttccagtatcctgaatacaggcagccgcatccgttatgctctataaagcctctcacatcctctatcggatatccaagcaaaagccccatctcatgtggaaactgcttgtgttcatcattcagatacgcttcgtagcgttttttgaatctaagtaatatcttgccgaatgaaaaatcctcatatcccgctttctttagtatgtccaaagcctctgaattattcagatatgcttctaaaaggctcctgcggaataagaggaaggcggttttctcattccttgctgcgagcctgaaatgcgatatcccggaagctctcagaatcactctcatggcactctcatcagtgctgtctatcatgagcatatttgaaattctcgctcctgtaattagtggggcacactggagggcaagctgcatttccacgctctttaaatccatgctcatagcaatctgaaatacttcctggcacattttggctcctttcgcgttagttatctctaacctgagttaaatatatct

SEQ ID NO: 1549 - DNA, 13103 bp, Unknown
  gut microbiota DNA sequence
ctgatttttctgccaaagttccaatacctgcatccaaatcacttgctccctttgcaagaccatttgctccatccgtatatgatttcaaaccatccttaagtgttgcacttccgcttgcaagctggcctgctccactattaagcttatctgctcctgacacaagggctcctgtgctgtttccaagtgtattcagcccaccacttaatgtactaacaccatcagtatatgtcttaagtccactctgcagtgtgccaactcctgatgcaaatgtgccgagcttgctctgcaatgttgaaagtccgtcagcaagtgtgtcggtaccctctgccagtgtctttgaaccatcctgaagctgtgttgaagcatcctttaagtcatttatcatgtcatcgaggtctgatgtgtcaattccgtctgtgcttacataatcagatgcgtttaccacgaaggtcatggctgcaggcattgagaaattcttcacatctgctgtcatttccatgtattcagggatatttacatcgccatcgagatctccgtccttgattccgaggctatcctttaagcccggaagtgcatagccgagcactacgcttgatgagtcgcttacctcagccttgccgtttgtcacttcgatattctcgaagccatcaccgagtacaagtcctgttactgctgcaaatggtacggaaactgtctgcttctcgccgtttactgtctctgtatatgatgtggtgtttgtgtagtcaaaacggattttgacctttcctgactttcctgcaaggtcctcaggtgagatttcttttccatctaggtagtatgtaaccttctgtgttacaggtggttcctctgttgctgtgccctgatagtatatgtccttgccgccggcctgccatgtgagcttatcaccgctttgtgtgaatttttccttgccctttacgttctcgatatctgaaaggtttgaagcatcctccagggtatcctttttgtctttattcttaaggtgatctactacgattgttttgtttacgttgccgtttgcatctgagatgaggtatacgctctcgtccttgtctgcatcgttatcctttaatgatacgctgtccatgagcttatctgctatgtcatcagcatccttgctgcttcctgttgtgctgtctgcctcggctgtgactgctgtgctgtccttctcggcaaaaaccgctgttgctccgattcctgtacctacaagtgctattgtgaggactccggctacaacacggacaatatatttactttttaacttttctttcaattctggtaatttcatgtcttattcctcctgattttatttttgaggttatatttttatgttatgagggtcaaaaagtattttatccctcatttatgattaatcagattactaagctgtaaggttcttatttttaaagcctgcgcttgtggcacatattactttgtcaaaaatcataaacattgacggaagtataaatactactacaaacatactgatgattgcgcctcgtgcaagcagtatacagatagaactgatcatatcaatgtttgaataaagtcctacaccaaaggttgcggcgaagaagcagagcgcactgacgataactgagtttgtcgaatctgcaagtgcctttgtgattgccggctttttgtccattccggtatatctgttctttctgtactttgtggtcataagtatcgcatagtcaaccgttgcaccaagctgtatggttccgattacgatgctcgcgataaacggaagcttcgttcctgtaaatcccggaattcccatatttacaaagattgcaaactcgatgaccgctacaagtatgattggaagcgataccgatttgaatacaatcaggatgataaggaatatcaatacgattgatactgcacttacacgcttaaagtctgtatctgtgatagtgataagatcctttgtacaaggtgcctcaccgataagcattgcgtcctcgctgtaattctttactatctttttaatctctgttatctggttgtttacctcatcagatgctgtcgcatattttgatgaaacaagcatcatctggtaatcaccgtttttgaatatctcctttgcctcatccggcaccatatcatccggtatggtaggtccaagtattgagtcaagcgataccgcaagctttactccatcaaccttcttgatatcatctatcatgcttatgctgtctgcctttgacatatcgctcggcgcgatgatgatatgtgtggcacccatagcatactccttgtcgagtctttcattggcctgcttactgtatgcactgtcaggcatggttcctgcaaggtcataatagacctgatcatgagtgtatccgtatattgccgggatgagcactacgatgaaaatcactgcaagtatcttataatgatttgttacccagcttgcaatcctggaaacatcaggcatgagaatcttgtgctttgtcttctcgattgccttatcacatgcaagaatcagtgccgggaggattgttacacatccgataactccgaatacaacgccctttgccattacgattcccaggtcaagtccaagtgtaaagctcatgaagcagagggctacgaagcctgcgattgttgtgattgagcttcctgttactgaaacaattgtgtgggaaatggcatgtgccatggctcgcttcttgtctccgtcatatctgtctatctgctcctgatagctgtgccacaggaaaatcgaataatccattgttacggcgagctgcaatactgctgtcagtgccagtgtcaggtatgaaatctgtccctgtataaagtttgttcccaggttatagataatagccattcctatacttaggaggaataacatcggaacaattattgaatccattgtaattcccatgacaagcattgaaagcaatgctgctatgatgacatatataggagcctgctgcataacaagtgtctttgtatctgcgttgaccgctgccattcctgctacgaagcagtggtttttcaccatcttatccatcttgttgacggcttccattgtctcatccgaacccattgtgtcactgtaggtgacgagcatgagctggctgtttgcatccttgttgttgaatgcgttgtacacctcatccggaattgcctctcttggcaatgtggaatcagcgattgttccgtaccagatgacatccttaaccccctcaaggtcctcaatgtcatcagccagagtctctatgtcctgatccttcatatcctctaagatcacaaatgacaacgctccggttccaaactcatctaccatgatatcctggcccttcatagtctctatctggcttggcagataagaaaggatatcaaagttgattctcgtgttgataaagctgatgcccgacggtataagcagtgcaaatgcaactatcagtatcagcacacgatgttttacgactccttttccaaatttaatcattagattcaccactctttcttttattcgtattgaagtataaaaaaaaagaccgaataaataaatattcaatctctttgatttgtcatgtgagatatacaaatccatcaatttgtatatccgatatgacacatatatgatattgtatttgatttctgacactttttcacagcatttttatatttatatgaacacatgcctctttatgattctgctttatgagcttgcttaagccgtcattttccatggcaattgtcctctacagctcacttagtatatcatccatcgagcgcgtaatcagatacatgtatgcctcagccatctccttcggctcaatatcatccatgccctgggctatccatccctccgtgataaagcacaacgactgcgcataatatgtagaaatcacctccggtgtgagccagcggtatttggatttctttcctgtgctcttttcgcttatgatattcataaacatctcatagacgcacttcatggcaatctgattaaacgtcactgccccctccagctttagtgctttcttgtaaaaaacactgtttgccgagatattattgagcatcagcacaatcgcctcaaaaatcattccggcattgagcagcggcttgatgggctcaagcagctcggttttgataatccactctatcagctcgtacttgtcctgaaaatgattgtaaaacgtggggcggataactccggccttgtccgttatctctttaattgtaatcttatcgattggctttttcgctgaaagctctataaggctctcagcgagcaccagatctattgcattcttaccttgctgtgtcattactcatcaaactccatcgtgacaaagtagcccttctcagtctccctcacatccacgacatcgccctcgcggcttttgagcctctcgctgaccacgtagtttcccgacatggcaatcgcatgctctatcgtataataatatgaagtcggaagcttgctctctgttaccttcagatggtcaccgaccttggtaagtccgggtctctccatcttaaactccatccgacgcattctgtcgcctttctgttactgcttaattgtcctcttttctatcctcaacaaacgttgactcatactccatttgcttgttgtaagcgctctcagcctttgtggcgcgggttgtaatccagatattggacactccgttgaaaatcaatatgatgcccacaacaacagtggccgtcttcattacatcaaatgcatttgtcacgcagattattccaaaaacaagactgattatcgaaaaaatcaggccgacactccagccaccataaccatattttctggcatcaacagcctcaataatactcctgatgctgtgaaaaatgagcactacaccgatgactataggtatcaggctcacaaccacctgaggctgcaccagaaaccatatgcccaccgctaaaaccataagtccaagcagtgccgaaagtccgtttgtgactatgtttaaaaaataactgcacatatagaccactccgatgatgataagcaccactgcaagcacattggccacaatcgtgagcaccgaagctctccatatgataaacaccaatcccagcgctatgcaaagcactgacgacaataaaaaatctgccttgattctgcctaaaaactccttcatacacgatctcctttaattttctaattcagttcctgcgctcttttctccaccaggtcaagaatagcctgaagctcagcaccctcaaccggtgcagctccatatccaagacgcttgtgatccgctgtaatctcgaccagctcagtggttttatcatctttcgcatcaattgcaaagtatctgccctgtgacgcagcagcatcccacacgagataagcgcggattgcgcagtttggtgccatatctcttgtcgggaaatcaactctggtgacattgagcgcatctgaaatctgcatggacataacagagaaatcctcctccatatatggatacatacgcttctgctgatatgcctcctcgtacagctcatctattagcttttccttctcatcggcgagtcggtccatgaactcttttccgccctcaaacatctgtgtcggcaggaaaatatgctcatactgtatacgctcgaagatgacatactgctctgctgtcatctgtacagtctttccctttgtcggtgaagtaggatgtccctcttttcttgccttttccactgcctcaatcttttctacaagaggccttttgaaaatcagattgtgtgtgaatgggttgaacgcgataccatcaagctttgactctttatttgccaccatattgataactgcaagaaacggcatatttacaatgcatggtgacggatgattcttagaaagctgtgcctttgaggtataaatcggcatgaaagcctctccctcaccgtttttaataaatagcggaatcggcttgttgttctctccgacatttgcaggcaccaaaaatctgctcttggtgcatttatcaatgagcttattgagtgtctcagcctttttgtcgcttgaatactgtgtcatcagcgcctcaacctccgggttttgcacctcaagagtgaaggccggatcgtcctttaatttatttttgattttatttttatccatttatactgcttctccttatattaaatgcccggatttacatccaggcattattttaacacatttcttttatcaactcaacaatcttagtgtctcttgctatccattctttatcaagaaaagcgctgttggcctttattatctcatccggcgtagcccatgacagatgatactcaagccttatctcgctgtctgtcatctgtgctgccacatgctcgtccttcacatcacagaaatacacgtaggtgtgacagtaatatatcttgtcagcctcaaatatatcgcgtctcttttctatgaccttgccgcactccctgatgctttccggcacgacaagaagccctgcctcctcgcgcacctcccgtgccaacgcaacctcgttggtctcgcctgcatcgatgccgccgcccagtatcttgtagtagccctcaccggcctgctgcatggcaagcttgccgtctctgataataaccgcgcgcaccgcgaagcgctcatatacctccatatcatcggaatagttgtgtttgtcaaatgtatatagcgtcctcatatttatcctccgtatatgggctgtaatcattcattagtatacatggaaagtagtttttattctacaccatttgatagcgaattggaatactattatcgtccatttacctgcaaagtagcaccactgtctctatgtgctctgtatatgggaagcagtcatatggtgttgcacgcttcactgtatatccatgctttgtgagatactttaaatccctcgccagtgtttccggaccacatgacacatacaccactctctccggcgccagcttgacaaccgatgataaaaatgcctcatcgctgccggttcttggaggatccattatgacaacatccgctttctcacccttttgtgccatctcgaccatgaattttccggcatcgtcattgtagaagcggatatttcggatgtcatttcgctttgcattggtgactgcatcgcggattgcatcacggtttagctcgactccgatgacttcacctgcatttttcgctgctatgatgcctatggttccggtgccgcagtatgcatcgattacacgttccttgcccgtgaggtgtgcctcgtgaatggctttttcgtataaaagctctgtctgtaccggattcacctgataaaacgagcctggtgaaatgcggaaggtgcagccgcacagcttatcctctatgaagcccttgccataaagtgtgatgtttctgtctccgagcaccatgcttgtctttttatcattcacgttgagcaccactgtcgtgatattgggatgctttttcctgagtgcttttacgaaattattcttcgacggaagtatcggcgatgccagtacaagaactaccattatctgccctgttgcatagccctttctcacaagcacatgtctgagaagcccatagccggtatcctcatcataggtctttatcctgaatgagcggagcatatcctttatgtcccttattatctcatctgactcctgctcctctatcatgcagctttcgatatccaccacatcatgtgtgtttttcctgtaggctcccgccacaatctgaccgcgcctcgtacagtcaaaggctgcatgaaccttgtgacgataatagagcggatttttcataccgacaatcggctccacaaagccaaaaggctttagcagctttttcatgtatgcctgcttggtttttaactgttccttatattctatgccctgatagtcgcagccgccacatttcttcgcatacggacatacgttatcgctttttgcccggctgcttttctcctttagtctcggctgtccgttggcttttttgcaatttttctcattacgcgtgtgtttttccctgtaattgccttgatttcccgccatatctgtgctccataaaatcagctatgctgactactttgtgtatgtattatatagatacacatgattatctatacagtgccatccgcttgaagcgcctgctgtcacacatatatatgtctttccgctggctgacttctcatagctgaccgcacaattgccggactgatttacaaagcccgtctttgcaccgattacctcgccacttgtcatcttgtcctctatacggcgcaggaacagattcgatatgttcaggttctccggatgctgcggtgttgcagccgtgctatatgtatgatttgaaagtactgttttacaaatgtcgtcctgcatcgctgcctgcatgatgaccgccatatcataggctgtgctgtaattgttctcatcatatatgccgacagggtttgcaaaatgtgtggtctggcctatcccaagctctgctgccttctggttcatcatatcgacaaatgcttccatggagcctgctgtataaaccgcaagctgatatgccgcttctccacctgatggcaggatggttccgttaaacacatcacgaagaggcacctgctcaccgtctaaaaagcctgttgtgctgcaatcatgcacatatgaataatctgtggcttctcttgtaattgtaacaacctcgttgagcttgttttctatcacagcctgtctgtctatttcagtgttttcattctttgctgcagctatcgcatttttctcagcctgctctgctgctacaagcactgtcataacctttgtcatggaagccggatacattttctcatgtgcattctttcctgcaacaactgtgccgtcctgctcatcaatcactacggcataggagctctccagctcatctccgattgctgctgtagcgtcagactcctttggagcaaagagttcctttgcttcctccgtctcactcacctgctctgtcacagcggtcacactttctgtgactgcccctgtgtcttttgccttattactatctttttttgctttattaaagcacgatataactatcacaatcgctataacgactatcacagccactattcctacaagcttaatctgtgaagctcctttatttcgtctgcggcatctgtaattatttctgctattatttctcatatccaatccctgtctcgttgtaactattcatcccacgcacattcgcaaaaccacacttgaataatcacatttcattttatactgtaacctatttagtatactccctatccggaagctgtgcaataattatcgcaataaacatgagcacgcatccaaaaatttctctgccacccagcatctggccaagcagaatccatcctgcaatcacagaaaccacagattcaaggctcatcgccaccgatgccaccgccggatttaagcccttttgtccgacaatctgcagcgtatagcccactccgcttgagaaaataccggcatagagaatcgggatccatgcatcccaggtgcaaagcgactgtgcccactgcgccataccgccggcagatggtcccatatcagtaaaaatcatcactatacatgtgccaagcccggtgacaaaaaactcaatgcatgaaagcctgaccgcatctacctgtgatacgaaatggtctatcacaagtatctgtatcgcaaagcacaatgcccctgccagcagaagcaaatccgagccgctaagtgaaaatgccccattcatgcacaaaaaatacatgcctatcagtgcaataaatacacctatccatattttggctccgcatcttctcttgaggaatatcccaagtatcggcaccataagtatatatgtagctgtaagaaacccggccttgccggattctgctcccatgctgattccaagctgctgcaggttgctcgcaaagaaaagtgctattccacagcagcttccggctatccaaagctctttcttttgctttttgctttcaggtctgtttaccgtcagccccttcatatccagtatttttatgaccggcagaaggcagagcgcaccaataaggaagcggatgccgttgaatgaaaaagctccaactgcgtcccctccctttgactgcgctacaaaggcgattccccagactatatctgccaaaaacaaaataaagacatgtcttgtctttgaggctgtattcattataatagttcctccgtgttatcaaaatcagagatattatatcaccgtctgccttgaattgcatacttaaatatgctgttacatttcgtttgtatatgaaattatacaaaaacaggcagcaaacaccctctttgggtattcgccgcctgtctttatatcttattgcgtaacactattatttacgctattctgccagcttaaaatgctttatctctccgtttcctgccacatagaaatcattatccttgtaaatgcctctgtagccttctgtatttttataggtcagtgcctgctgctccaaaagactaaagccgttttcactgtcatacgaaaacagatagtagtcattcgcagtaaatcctatcagatttttctccgggtcagcaagaatagccttgtagttgtatacaaactcattactccagctctcagaactgtcgataagcttctggttcacctcaaccggctttgtcggatcactcacatcaaacatagtaagctttatcttactctgctgcgaatcaccatagcctattccaagtacgtgcgtatcatcccacatatgcagatattcagaaaatccactcacctcaagctctcccaaaagctttggtgatgtcggattagatatgtctgctacaaaaagaggatccgtctgcctgtatgtgatgaaatatacgtattttccgacaaaacgggctgcatagatactctctcctcgcgcaatctcatttatcacaccgacctccttcatatccttatccagcacatgaagcgaattgacaggctgactgccggtatttgaggttggaagcacatacagataccctccctgctcatttattgcaaatttatcgttaaaataaccattcactgaagtcgtctccccggtcttcatcactccatcctcaaacgaaattttgctgattttggtaagctcacggcttgcactccaatcggaatgatacagatacatggcattgcttgaaacatacacctcaccgctattattcataatgcattttgcatctatcgtcttatcaggtttatccacatcaaagctggaaacgactgtgcctgaatatgtatcctctcctatatagaagcagtcatagcttatcactttgccatttacctgaggcacccatttctccagattatcctcctgcagcgccacatttttattcatatcggaggtctttatatatgtgtctgaaaaaacatataccgtattgccgattttgcgcgatgtattgtaaaatccatcctgacgcgctttacctataagcaccggtttcgtcgggtcagctatatcatagctatagcatatagtctcatccttatcgcctgcatggtttgatatgataagcatttttccgtcactgatataaagctcctctacagtatctgacggtacctcaaaatcaggacgaaacagcgtctcttccccaggctttccctttgaaatatccgtaatggatatctgaccatcctcgaccatgtaaatgtattttccgtccgtctttaccacatcactctcatcaacgccctctgtcatcacgttggttgttgaatactctgtaccgactgccgactcctgtttatttgtagacgatgcatcagacgtaattcctgttgcatccgcactctccagcaagtctccagatgcagtattccttatggaagcctcagctttttttgccacatcatacaatttcccgtaatcagaggccgcttcataatccccaagctttgcaccgctctttatccctgcatagacattattctgcgcattattctgtgaaatcacatttgcagtttttgtctccagctcatctatacggttattaagccgcacaacctccgtgcctaagactgcaacaacaaggactgccgccactgtggcaagcgcttttgctgcccgtgcaaattttttgtgctttttcctgtttttgtcttcttttccgccgtgatgggtttcatgattttttacataaatttcatcactgtacccggccgattctccggtcggctgcgcttcttcaattatttggtcatcgatgtaatttaaaccatcaaataaatcctttttcgtcatagatatacgccctcctcatccagatattttttaagctctgcccttatcctgaacagtgtggtctttacgctgcttttgctcctgccgctcatatctgccagctcatcaatcgtcatgccataccagtagcgtctcacgaaaagcactctcttttccgtctccagtccgttcagaaaatccgataaacaccttccaatgtccgacagctcgccctcgtattttgcattgctgtctgcaaggcactcctcaagctcatcaagcatacagttcatgttggaatttctctttgaagcattattccagtcaatcctgtcgcatacgatattgcggcataccctgtaaagccatgaaaggaaacgcataggacgctccggcggtatcttgttccatgctgctatgtatgtgtcgtttacacattccagcgcatcctcatgtgctatcatcgtgtctgcaaaccgggtaagcttcgctccgtacatctgcgaggtcgcactgacagcctgctggttgcgattaaaatacatatcaagtatctgttcctgtgtgtacattttccacaaacctcccttctatatattatgtaggattttgtttggtgggggttacatctcattattaattaaaattttcattatttaaacgttaagcagagtcttttggagatagtgcttatagtgctgaataattgaattgtatcatatttcgtcttagattaaatattaaaaaaggaagattctccttagaatcttcctcatatgaattcaaatagtaatatttaattgttcttctttgccgtaaatgttatcgcatctgaatccgctattg

SEQ ID NO: 1550 - DNA, 2465 bp, Unknown
  gut microbiota DNA sequence
gcattgtatatatggaatttaagctccacctgatcgaccgatgtgattccatttgcctcaagatcacttgacataatggttatatcatctatagacttctttccgtcatagactgtggttgaaaacagcggtgtcatcatatatccattgatagacatattgtccacgtttattccgacattctgacctgaggtgttttcgatgtaaagtaaaattgctgttccccagaaggaattttcatcaactgtttttccaacaatccttacaccatttgcattgtaaagctcctgcccctcatcgtttggtgtcgtatccatgtttgcaaattcagaggtctcaagctttgaatatacattcttgaaaagattatcccagtttgaatcgtatgcgtggaaatacatctcaatttgtcctactgtatctattccggcagctttaagctctgctgatgataaatacataacctcattcgacttctttcctgccgcaacatccgcgctgaacagatctgtgatcatataatcgttcacgattagtgcatcacagcctattgtatagtccttggccgaattattttcaaccagaagcttaattccgtctccccatatgctgtccgtcacatattcagtcgcagttattttgatgccatcctggtctacaagcacctgctcattaatgctctcatctgctgatgcctgatctgcgccggctccattagttccgctgctccctgcgcctccaccggtctctgttgcgcttcccggtacagctatactctttttttgccctgtgtccgagctgcatcccaataatgtaaaagtgattgctgtgatactcagtacaagagccagtaaattagttctttttttcatggtttaagtcctcctctgtaaattgtaggactattataccatcacagtatgaataccgttctccccgcagcggtggtaaaattatattctaaacctactcctgcacaccacttgtcctgagcatttccatgccatttttgccaagtaattcattcacctctatgattccacccggacggtccttaaaaataagcataagaaaagcatctctcggaatttttgcatagagctgcggcatctcgtattttctcaaggctctctgggtctgctctaatgtaagctctgcagcataacatatcctcaggataatatccctctgccaggtatgtttttcgcctgacagaagcttgtagccgtatttttccggaatatctgccttcaaaaacaccatctgctgtgttattttcttttccttaagcaaatcctttatgtactctgaaaacgcattttgctccggatccatgctgcctttctgctcaacacaaaatttatcaaaatcagatatatgagcctttccaaggatatcatccaattcttttgtatttttttgcttcataaatttctcctatctgttatacttgtacttgtaactattcctacctcattagcgatacctgaaaggatacatgcaccatgagcgattacaaaataatctcagccttaaatgaagagcacaaggtttatctggttcaatctgcgctttccggcaatatttatgtccagaaaatccttgatgtatacaatatccgcgtgtacgaatacctttatcgcaatcctgtggccggtatcccacgcattatcaattactatgaagatggcaatcagcttgtcgtaattgaagaatatataagcggaacctccctgcaggaaaaaatagacaactctgaccttagtgtttccgatatcagaagctacatgattatgctctgcaatatactcgaagctctgcactcgatgactccgcctataatccatcgcgatataaagccgtcaaatatcataatcaccagttataattatgccatgcttttagattttaatgccgcaaaacaattttcaggacaaaacgaatctgataccgtgctgattggcacccccggatatgctgctcccgagcagtatggctttggttcttcatctccgaaaacagacatatattctctcggtatagtactgcgcgaaatgcttggcagcatcactccggttcctgacattgctccaattttgcaccggcttaacctgattgcagaaagatgtactcagatgacaccagcctcaagataccagtctgtggctgaattaaaaaatgccgtatcgcagtcatatcatcctgcacagcacaacactcctgctgccggtaattcaagtcaatatgaacatcagaaccatgataatgcagccaatgccgatactgctaaacgagatatccacgacagtgcttcccgtttcctcccacccggatttcgcacgagaactccatggaaaatgctgctatcctcagtcgcatatctattcataatatggctttgcctgtcattggaaatagaaaatacttacggagcaaagctgtggcttgaaagaatcttctgtctt

SEQ ID NO: 1551 - DNA, 210 bp, Unknown
  gut microbiota DNA sequence
acaagattacagtcaacatcgactcaatgaactctgcaggacttggagtaaagggaatcaaggctgatacagagcaggatgctacatacgcaatcgatgcaatcgcagatgctatctcaactgtatcttcacagcgttcatcactcggtgctgttcagaaccgtcttgagcacacaatcaacaacctcgacaacgtagttgagaatacta

SEQ ID NO: 1552 - DNA, 2963 bp, Unknown
  gut microbiota DNA sequence
aggatggaaaggtcagtaggatgtaaaagagaacccaataacacaattattgtattttataaaataatccgctatactatgattaacagttatagcggatttttttatggaggctttgatggatagaacattaaaattaccggttggaatagataattttgaaaaaatacgaaaatcgggcttttattatatagataaaacgaggcttatagagcagctcctgcaaaattggggagaagtaaatctttttacccgtccgcgtcgtttcggcaagactcttaatatgagtatgtttaagagcttttttcaaataggtacggataaatctatatttgatggcttgtatatttcacaaaatacagctttatgcaatgaatacatggggaaatatccggttgtgtttatatcatttaaagatgttaacgggttaacgtttgacagggcatatgatgcacttgtccagataataggtgaaatagcaaatggattttcgttcctaatgaatagtgataagctcagtaaaaatgaaaaagagcagtatcagggaattatacagattaaagatggaaaatatcatatgagtgatggtgtggttatttcatcattaaaagtgttatctcagcttttgactaaacactatggcaagaatactatttttataatagacgaatatgatgtaccgctggataaagcattccagcacggttactacgatgaaatggtcgagcttatcagaggtattttgggaaaagttttaaaaacaaatgattatttacaatttgcaattcttacagggtgtcttcgtatctcgaaagaaagcatttttaccggaataaataattttaaagttttatcgattcttgatgccagatttgacgagcagtttggattttcggatgatgaggtgaaaaatcttcttgcagactatggactggcatcacattttgaagaggcaaaggagtggtatgatggttatcattttggtaatgtggatgtatactgtccttgggatgttataaattatgtggacaatcttgttgctaatccaactgccagaccacagacttactggataaacagtagcggaaacagccttgtaagacgccttataaatatagctgattcgacaaccaaggatgaggttgagcgcttaattgccggagagtctattgaaaaagtggttcatcttgaacttacttacaatgaaatagacaaaaatatagataatatatggagtgtactttttactacaggatacctgacaaaagtaggtgaagtgaaattgccggatagtgagaattatgcacttaaacttgttatcccaaacaaagaggtcagagaagtttttattctgcagatacaggaatggttcaaggaagttgtagcaaaggacaatgatgagatcagagtgctgtcaaaggctattcttgaggctgacaccgaaaagattcagagacagctcaatataatcatggatcgtatgataagtattctggacactaaggctcgcgatagacagaaagaaaatttctaccatggtcttttgcttggccttttgagaggaagcaatccgaactggctgatcaaatctaacagggaatcaggggatggattcagtgacattatcataaaaccggaggatcctgattcgggaattatcatagaggtcaaatatgcaacgtcttttcaaggattggataaatcttgtgaagatgcaatgaatcagataaatacacgcagatatgatgctgtacttcgtgaagagggcagatgcaatatcattaaatacggaattgcatttcataagaagcgctgtaaggtggtatcggataagtaaatagacttaataaaaagatattctgataaataggttgattgtaaagtcatgacaaaaatccattgcaataattaaaattgcaatggattttttattttacaactatgacacatcacaggtttataattatcataacaattaaacatcagcaatcaatcaaggagaagaaactatgaagaaaaagaaaattacagcaataatggcagtgatcatgatggcagtggggctttcagcatgttcacaatcaaatgccgggctagagggaaaatcaggtattgtaaaggatgaggattcaaagacagaaggtgacaccggtgtagtagaccagactccggctacgtatgtgcaggatgcggagtatgttaacaaagacgacatcgtgtcagttgatgatacaattgagataaatggaattacttataaaattgaaaagtatgagcataccacagagtttggaaacagaaataaggatacggttgcggattatttgaaagatagctgtgaaggaaatatagatgaaaattataacctgagcaatggctatagttatctttttataacgttgacattcacttataaggatggagatgataagcagcttgaaggaaatagaaatgcaggtattctgtatgccatcaagaatgatatggagagaatacagcaaaattcagatagtgtatatatagatagctattggcttggaggagatgaaagtgatgtatatcattatgttttaggcaaaggcgagtgtattacatcagagcttggatatattattcaggatgagggaatacctgaagattctaagtatatttattattgtatagagggtatagattcaaaaaccaatgatacggtgaagaaatattttaaactggagctgtagttatgaatagaatatttaaactcgaaattaaacgtgcttttagaaatagattgtttgctgccacattgtgtgttgcgtttgcaatatgtgtatggcattttatggaaaatgtgtggatatggaggatgtatatttactctgacacgtatccgttgtctgcatatgagaaatggataggtgcggataatgcaagtgtgcagccgttgctgctttatctgataatgcctgctttgtgtgcaa

SEQ ID NO: 1553 - DNA, 4512 bp, Unknown
  gut microbiota DNA sequence
catatgaaggaattgcttttcaatatatggcaccatccgtgtttgaaaatagtcagtttgagtatgtacaaaatcatttgagaatattatcagctttttacggtgttttaaaacctatggacggagtaacgccatatcgcttggaaatgcaggcaaatgtcgaaataggagatgcaaaaaatctgtatgagtactggcatgatatgctgtatcgttcagtaattgatgaaagcagaattataattaatcttgcatcaaaggaatattctaaatgtatagaaaagtatcttacaccgaaggataaatatattacaatttcattctgcgaacaagctggaaataaactggtaacaaaaggtacttatgctaagatggctcgtggtgagatggttcgattcatggcggaaaatgatattgaaaatcctgatgatataaaaaagtttgacaggcttggttatatattcaggtctgatttatcatcagatagtaaatatgtttttgaacgcaaaatagcataattattttaagttttcaagagaatataatttgaaaataataactattactaattttatattataagataacctgtaataaaaagaggacatatggatttatacatatccatatatcctcttttttattgatattaatctacaagcttgtcaagctccttgatatactcagtttcacttgatgttttatgagtagactgttttgcatacaatccgacagaagtctgtgatttcttaattgcctgcatggttccagcaccggcaacacagcctccgggacatgccataccctcaagcagatatccgggatacttgcctaaagttgcaagtttaagaagctgacggcattcctttaaaccttctgcgtttgctacctttacctcctgatccggatgatcacgttttataacattaacaacagcctgtgccacacctcctgcgactgcgaagtttcttccgtctgttgaagcatcgctgacacctgcaggatcttcctcgatgttttcaaggtctacatgctttgcagaaaaaataccggtcatctcttcaaatgtgaggacaaaatccacttcacttcgtacactgcgtcgcatagcttcaagttttttggcagcacatggtccgataaataccacgcgcgcatctggattatgctgctttataagacgtgcagtgagtgtcataggtgtaagtgccattgagatacattttgcatgctcagggaagagttttttagccatgacagaccatgccggacagcatgaggttgccatgaaaggaagttcatccggtacctcttttaggaagtcctcggcctcctgcttggcacagaggtctgcacctatagctacttcaaatacatctgcaaaaccaagagccttcatggctgcacgtagctttccgggagtaacttttggaccaaactgtccaacaaatgcaggagcaactgcagcatagaccttttcaccggactgtatagctctgatagtctggaaaatctgggatttatcagcaatcgcaccaaaaggacagttgacaaggcattgtccgcacgaaacacacttgtcataatcgatatttgctttgccgttttcgtcagaagaaatggcatccatgccacaggcctttgcacatggacgttcctgaacaataattgcattatatgaacatacgcttgcacagcgaccacactttatgcatttttcctggtcaattatagattttccggttgtgcgatccagcgatatggcatcttttggacatacctccatgcatggatgagccagacatccctgacagccgtctgtaacatgtactcttttttcagggcatgcattacaagcaaattttataacattgataagaggcggtgtatagtaggtttcatctttgtcggcagcctcgattccatctgatataggtgaatgctctgcagcactgcggtaaggcagacccattgccagacgaagcctctctccgactatagcacgctccaaaaatacatcgttcctgaaatttcctttttcgccaggaataatcttgtatggaagagcttccatacgatcttttacaggccattcggtatgatatgccatacgcgcaacctctgtaaagattttatgtctgatttcttgaattcgggtttcgacacctctcattattgattcctccttataaaataaaatctcaattttccttattgtatcagataaaataagcattctcaataaataggctgtactttttatgatacataaatactagataattaatgaattttaaacctgattttttgcgtttctttgaaaataaaggataatataaaatttttaaaataggaataattactgtttttatattgactaaagtactataatactatataataattatggttaattaatcctaattaataagaataaaaagttatagaagcaatttagattttattttttacacatggaaggagaaaaaagatggaagtaaaatattatgtatgcaatcactgtggaaacattattgaaatggtaaaggataagggcgtgccggtagcagatttttgtctttgcgatggtgagcaggtagaagaagtatatgcatattgcaatctgcatggattatggaaatgctaagtatagatattgttggacttacaggagcctgttcctatgctttggactgcatagaagcagagttggtaaatatcaaaaacaaacatggaaaaagagtggcttatataagtatacgcatggctgaatattggaaaattcaaggtgatgaattacaagatttagccatgtgtgctttactgcatgataatgctttgacacaatatatttctgaggagcttaaaaaggattctgttattgacctaaaaaaagatttatctgaggaaaaaacgaatctccattgtatatatggtgaaaagaatattactaaacttccatttaaaacagatgtttcaaatgtgattttgtatcatcatgaacatgccgatggaactggcccttttcaaaaaaagtggaatgaaattccattgttcgcaaggattattcatcttgcagatatcattgatattataagaaatagtattgattctgatgataatagctgggattttatgtgtcaatatctttcccaaaataaggatagtctatttgattcggaatgtgttaatgcttttcttcatgtattcacaaaagaatcgtttatgtgtttaagtgatgattcttttgaaactaagctatggaaagctatcccaagagaaaagctggtttttgattgggaaatgtgtaaagatgttgcagatttctttgcaaagattgtagattataaatcttcttttacaagcagacattctataggagtagctgaaaaagcatccatgcttgcccaatatatgggatatgattcaatcactgtacagaaaatgtatttagctggtgctctgcatgatataggaaaaatggcggtaggcaatgaaattctggaaaaaccggataagcttacggatgatgaattttctaaaatgaaaaatcatgctggttatacatacctaatattatcagaggttaatgattttgaagaaatacgagactgggcagctttccatcatgaaaaattaaatggaaaggggtatccttttggaaaaactgctgctgaattaaatgaaccggaacgtatgatggcatgtgttgatatttatcaggctcttacggaagatagaccttataaaaaaggattatctcatgaaaaaacatgtgatatccttgatgacatggcacagaaagattttattgattcggatatttcaaagataattagagaatgttttggaagaaaccgatgatatataagataatagtgttttccattgtatacttgtattacgtggatttcaaaagaagaataagaatgaaagtaggattaatttatgtatgaaatgaaaccagaatattatatcggcatagatatgatagacgaagagcataagcagttgtttaaatatgcagatgatgcatatgaactgcttcatgacgagaatacaccggataaatatgatagaattgacatgatacttgaagaccttcgtgattatacagcgaaacattttaatgatgaagagcagtatatggagtctattaattataaaaaattatttactcaaaaaattcagcatcaggaatttatacacaaacttgatgaatttattgaacatcacaatgatgaaataaaagatcaggatgaacagattatgggtattttaaagtatctcacagagtggttagttaatcacatcctatatgttgatggtcaaattgcagaatttgtatcaaaaatgtaatcttttgaattgctaataaatattatatttgatggtcataatatctcttcagttggagagaataccttttgatcatcaaatccacctgtttgtttgacggagtaatggatatgaaaatcagggaaagggctatgggaaagcactaattgattt

SEQ ID NO: 1554 - DNA, 3057 bp, Unknown
  gut microbiota DNA sequence
gttaatagatatggtatatttgcaaagatgtttataacttccttcttgaaaatatacatagtgcgttttttcgagtccattcgatgttgctatgcttttgtgtatgtattaattgaagtgataaactttatcaataagtccgggaggacgcataataagggcgtttgagggcctgaattagcaagaactgtatgagattaggcttgaataacagtatttccgggaaatataatgtttcttgtaagtaaactttaaccagaatttttgtaaatatacaggaggaaaacattatgtcatttaattggaaagcttcaggtttattcgcagcaggtgttgcttttggtacagcaggtatcaagattttatcaagcaaggatgctaagcgtgcttatacacagtgtacagcagcagcgcttcgtgctaaggattgtgttatgaagactgttaatactgttcaggagaatgcagaggatattcttgctgaggctaagagcatcaacgaggagcgcgaggctaaggctgaggctgctaaggtttcggatgcatctgaggatgtatgcgagtgtgctaaggctgatgagcaggaagcagagcaggctgaggttacagcagagactgctgaggcatagaaaataagaggcggtcatatgaaatttacgattaagcatgagtcaagaggccgtatgcgtgttcatatggagcagtaccgcatgacatatgagcaggcggacactctgctttatgtgattcacaatcacaggaatgttacctttgtaaaggtttatgacaggacggctgatgctgtgattgagtatgtaggagacagagagcagattatagagctgcttcgccactttcattatgagagcgccaatgtgccacagactgttattaagacatccggaagagagcttaataattcatatcaggaaaagcttatcggaagtgttgtctggcattacagtaaaaagctcctgctgccttggccaatcaggacagcgcttactgttggacgttctataaagtatattggaattgggcttaagtgtctgttgcagagaaaaatagaggtgccggtgcttgatgctactgccatcacggtttcgcttgtcacaaaggatttttctaccgcaagctctattatgtttctgcttggaataggtgagcttttggaggaatggacacacaagaagtctgttgatgacctggccagaagcatgtcgcttaatgtgagcaaggtatggcttaggacacctgagaatcaggagatactcgttgagtcttcaaagattgaaaagggcgacaaggttgttgtccatatgggaaatgtcataccattcgacggagaggtcttagatggcgatgcgatggtcaatcaggcttccctgacaggtgagtcggttccggttcaaagaactgtcggcaatactgtgtttgcaggcactgttgtcgaggagggcgagattactatcagggtcaaggaggttgaaggaaacaaccgttttgaccagattgttactatgatagaggagtccgaaaagcttaaatctgagctggagggaaaggctgagcactatgctgacaagcttgtgccgtggacgcttggagctacagggcttacatatcttctgacaagaaatgtgacaaaggctatgtcaattctcatggtggatttctgctgtgcactcaagcttgctatgccaatctctgtgctttctgctatcagagaggcaagcctttataatgtaacagtaaagggaggaaagttccttgaggctgttgcagaggctgataccatcgtctttgacaagaccggtacactcacaaaggcacatccgactgtggttgatgtggtgaacttcaatgatgagtattcatctgatgacatgcttcgtgttgcagcctgtctggaggagcatttccctcattcaatggcaaaggcagtggtagacgctgcgtctaagaaggggctttcccacgaggaaatgcatacaaaggtggagtatattgtggctcatggaattgcaacctccatcaatggcaagcgtactgttatcggaagctatcatttcgtctttgaggatgaaaaatgtgttgttcctgcaggaaaggagccactgtttgagtcgcttccgctgtattattctcacctgtatcttgctgttgagggtaagctttcggcagttatctgtattgaggatcctctgcgtgatgaggcagcggcggttgttacttcattaaagaaggcgggtatatcaaaggttgtcatgatgacaggcgacagtgagcgtacagcttctgtcattgcgaaaaaagtaggtgtagatgaatattacgccgaggttttacctgaggacaaggctgcctttgtggagagagaaaaggctaagggcagaaaggtcattatgattggtgacggcataaatgattcaccggctctttcagcggcaaatgtcggtattgcaatcagtgacggtgctgaaattgcacgcgagattgctgatattacggtgggctctgacgatctctaccagattgtaactcttaaatatataagtaatgctcttatgaaacgtataaagagcaactatcgaaagattgttggttttaactcagggctcattgctcttggtgtggcaggtgtgcttccgccgactacgacagcacttttgcacaatggatcgacaattcttatcagtgtgaacagtatgaagaatctgcttgagtagattttggatgtcaatgtttattgatgtagtacggggcgctgccgcgggtaccgtggtggcacacgtactatcccgcgtgctacgcttcgtgggtaagatactatacgaaattatgcttgaagggtttctatgcttgacgaaaccgtcgaaacgcgccgtccatggcgcggttctcctcgcccctgcgtccttgcaggggcgtttctgcgcttcatggcataatttctacagtatctaactcactgcgctattcgcacacgtgatagtacgtgtgccaccgcggtgcccgcggcagcgccccttacgttgtggtggaaataatgtagga

SEQ ID NO: 1555 - DNA, 1617 bp, Unknown
  gut microbiota DNA sequence
catttgtaaataaggtcagagagtatcatgcagacggggcatttgatgatcttgctatagatattgagaaggctatagactattgtattgacaatgatattctgaaggagtttctaaagacttacagaagtgaggtgacgaagagtatgcagttaaattatgaatttgacaggcagcttgagcttgaaagagctgatgctatcgaggaaggagaaaataagatgttgtttactctggtaacaaagggcaagctcgatattgatactgcagcagaggaagccggtgtcagtgtcgttgagtttgaaaaattaatgagtgaagcaggctataaggtgcctgagactgtatagctttaggcaggaataatttatcaaaatgtaaatagcaaaaatccgctaaccattgtatttggtatagcggatttttttgccaaaaagtatcacatccgactgttgttgtactgcgctattgcatcggcaccgcctaacagcagtatgataagtatagccccaatccatggaaacaacatcgtaaaaattccaaaccatgcgccaagtgaatcgctgctataatcccagaaaggcttgttcgggtcatcaagccagtacacatttatgatagtcctaagcttagaacgtgtgctatgtctgttatcgcatgaaaaacgcttgcggtactcctttccgtctacggtatatgtgtatctggcagcccagtagctgtaagcggattgtgaattattgacaacgagcctcttcgcatcctccttcacaatcatgcctcgcaccacatgtccacgctcctttgcaagtgctatcttgcgctgtaaaccaatatttagtttgcagaaaaacttaaaatctatgatgtacagtggtattagtgaaagcacaccaacatttacctgccacgggtagcttgcgatagccttaaaaacttctgaaaaagtgtccattgaaaatcccctttctttatatgctgcatttgaaaatatggtatgggaatattatagaaataaggaaggagattggcaatgggaaaaaatatcaatttgtagaatctttggtatcgaaaagtcctttttcgagtttcaaatagtattcggcaagtataagggcatgttctacattgcgttggggataagatttgtttagtctttctaatgtgagctgtagtgaatttggttctttgttatctccgaaaatcaggtaatcgatggaaacatcagtgatttcagctatatgaacaagtacatccagatttgggactcgctttccggcttcaattaatgctaaatatgatggtgatatataaagaatatcagcaaaataggcctgtgtcttattcttcttaagccgtaatttgcggatgcgctcaccccgcgcctgagcgtcaatgttgtaattattcataaaacttcccaaaattaatttataatatatgaaattgtattaggattttagaacagtagatttattaaactgtcccctttgtcaaggacattttgaattagtgtagtgcctgttttttagacatctacactaaagtgatatccttgattttggacattccctggtttggttccccacagaagtggacacatgacattttcggtat

SEQ ID NO: 1556 - DNA, 10614 bp, Unknown
  gut microbiota DNA sequence
gtgtcttacacacatccacatccatcttacatgcctttgagcattgaccgcatccgacacatttgctgctatcaacggtgattttgagcaggctgaccttattaaataatgagtagattgctccaagtggacaaatccatttacagaagggcctgtaaaataaaatacttagtacaatcactgcaattaaaatcatacacttgaaagaaaaaagctttcccagcgcagaacggatagcagcatttccaatagataacggtatagcaccctctaaaacaccctgaggacagatatatttgcagaagaacgggtctcccattcctatagagttcgttataagcatcggaagaagtataacgaaaacaataagaatgacatattttaggtacctaagaggctttaatttggctgtggataatttctttccgggtattttgtgaagtaaatcctgaaaccatccaaatgggcacaaaaaaccacatataaatctgccgagagttacaccgagtaaaataaaaaatccggttatgtagtatgaaaacttaaattttgatgatccgacgactgcctgaaatgcccctattggacaggctcctgtcgcagcagggcaggagtagcagtttaatccgggtacacatactgtttttgcattgccctgatatattttacccttaaataaattcggaatatgaatattggtcagcagcgttgctgcggcctgtatccatccacgtatttttgccagcttttttgatagtaatttctttttcttatccaattccgacacactccagacatagttttattgctttaccaagcactgtagccgcctcacctctgactgcaccatagcttaccatggatacaccaaggataagcagaatgatttgacatgttttttggtatttcaacataatgttgctcctttttattgtattgttgaccagctgactttggtattatacaatataggttgtaaaattattgttaagaagcaggagaaaattttgagattattaattgttgaggatgagaaacaaatatgtgatatggttgcaaagagtctgtatgctgccggttatgaggtggatacctgttatgatgggaaagaggctcttgaatgtatactgtcggagaattatgatctgatagttttagatttgaatctgccggggatggatggcatggagcttcttaaggagcttagaaaatacaatgatgaaactaaggttttgatattatctgcaagaggtcagattgctgataaggtagaaggactggatgcaggagcaaatgattacatggaaaaaccattccatctgcaggagcttgaggcacgtatcagaagcctgacaagaaggaaatttgtacagaatgatatatgtcttaaatgcggagaaataaagtttgatacgattaaacgcgaggcatatgcaaagggagagccggtcccactgacaagaaaagagaatggtattttggaatatttacttatcaatataggcagaccggtgagccaggaggagctgatagagcatgtgtgggatgccacggcagacagctttagcggagcaatcagggtacatatgtcttcacttagaaaaaagcttaaggcgaagctgggatatgatcccattttgaataaggtaggtgaaggctataaaatacgggaggagtctgacagatgaaaagaatgtcgttacagtggagacttacgtgcattactacattgtgtattgctattatatgtggctgcctgacgatgtttgtctataaaaatggtgtgcattacatcgattctttgcaggatgcggtagagtcacagggggatgaaaaaggaaacaaatcagatgaaatatatatcagcataccggacgataagtgggatgagtttgcggatgaattttcggttcaggtgtacaataataaggccgactataaaagaaacagtctgataatcacggttttgctggcgcttttgggaggtgtcgccacttattttataagcgggcatgcactcagaccaatcagggagttttcagataaaattgaagaggtacaggctcagaatctgtctgattcaagaatagaggaaaacaatgttaaggaactgaaccagctgggtatttcttataataagatgcttgagcgtctgtcggaagcatttgagatacagagacagtttactgcaaatgcagcacatgagctgcgaactccattagcgctaatgcaggtacagcttgatttatataattcggcctctcacctgggaaatgatgcagacactttgcagaccataaaaatggttacggagcaaaatgataaattaaacaggatggtaaagactcttcttgacatgagtgagcttcagtcggtgggaagggatgataaaattatattggatgctattgttgaagaggttttggcagacattgagcctcttgccgtggaaaagaatataaagctgattggaaaatgtgaggatgccactatgataggcagtgatatccttatttacaggcttgtatacaatctggttgagaatgccatcaaatataatcatccgctcggacaggttacagtaaccgcatatcagagaaacaagcatgtttatctgtctgtagaagatacgggaagcggaataccaaaggagcttagggagagagtgttcgagccatttttccgtgtggataaatccagaagccgggagctgggcggcgtaggactcggacttgctcttgtccgtgaaatcgttagagtacatgatggcagtatttgtattaaatcaggcaagaccgggggaacgattttcgaggtgacttttgcacggagttcaatgtagcgtttcattttacacttttgtcaacgctattaaaacagatttcttaatagattttttaacggcaaaaatataataatttagattaaaatatactgctgtttttgccaatgatgtggtatactatataatagattaacaaggttatttaatataatttatggcggaggataatagatgcgatatctttcagttgctgaaatagcaaaaaaatggaatatgtcagagcgcagtgttagaaattactgtgctaaggggcgtgtgaacggtgcatttcttactggtaagacatggaaccttcctgaaaacgcagagaaaccggagcgcattaacaaaagaaaagaagaaccgattacgctgttggatattctgaaagagcaaaaggcaagtaaatattccggtggaatataccataagacacagattgatttgacatacaactccaaccatatggaaggaagccgtctgacacatgatcaaaccagatatatctttgaaaccaatactattggcgtagaaaaagaggtgctgaatgtggatgatgtgattgaaacggcaaatcactttcgttgtatcgacatgattattgatcatgcaaaagcagctttgacggagaaattcatcaaagaacttcacttgattttgaagaatggcaccagcgattccagaaaagattggtttgctgttggtgattataagaaacttccgaatgaagtcggtggcatggatacagcccttccggaagaagttgccgataaaatgaaggcattgctggcggaatacaatgccaaagaagaaaagaattttgaggatattctggactttcatgtgaagtttgaacggattcatccgttccaggacggaaacggtcgtgtgggcagattgactatgtttaaagagtgtctaaaatacaatattgttccgtttatcattgaggataatttgaaaatgttctattatcgtggattgaaggaatgggacaacgaaaaaggatatctgacagatacctgcctgaccgcgcaggacaagtataaagcgtatttggattattttaggattaagtattaataaatgctttttcttttccaggttgataagctgctgtcgattttatcggaagtaataaggaaacaagaaaaatgaaatagagaggaatagcagaatgatgacagtaaaagaatgttatgagagtatggaagccgatttcgaaggagtaataggaagaatgggcagtgaagaaatggttaaaagatttgccctaaaatttctggatgatcccagttattcaaatctggaaaaggctatacaggagcagaacgcggaagaagcttttcgcgcagcgcatacactaaagggactttgtctgaatctgggctttgacagactgtataaagtcagcgaggagctgacagagaagctacgtggaagagaactcgatggatacgaggcattatatgggaatgtacaaaaggagtataaaaataccatagatgccattcaaagaatgaaagagtagcttgtatcggtagcggatgtttatgatgccgatgattttgataaatatgatggatataacgcagtagaagcaaaaaattattttgatacaaaagaggctatttgacttatgaaaataatgtttttccaagaaacgatattccgacaaaaatttactttggtagaagaagtaaaaggttgttaaaaaatggacgtataagaagggagaaattcatatgcctaggatgaaatgggataaactcaatcaaagacaattaggccaatatggggaatattatgcaaagatggaatttgcttcatatggatatgatgtttatacatcggaagtagatgatcatggtgttgattttgttgcaagggatatagtaacgggaacattttatgaggttcaagtaaaaagtatatataaaggtaagtatacatatatgcagaaacaacatatgagtgtggatgataaatatagattagtatgtttcttgaagtttgaggatgatagattacctgaagtatatataattccagcaacggcatggcaaaaaccaaatgcaatacttgtggatagaaaatatgataaaccggggcagaaaagtaagccagaatggggaattagttatacaattaagaataagaaattgattgaaaaatataaagcagaaaacttttttggttaagtatttttataggaggtgccacaatgccatttaagattgtccgaaacgatataacaagggtaagaccttttggaacagcacacattttgaaggcaagctgtatattcaaactggcagggtaaaggatgtttcaaagcagattcacgcaaacccgaaggtagaaatctgtgcatttaaaaatggcgagtggcttaaattcctattactaaaaaagttattgacataataaaatgaacggtgtatattttaaacatgaacactgttcatttaatgaaataacttaatgacattacattggagaggagtgaactcgtgaaccatcttgcaacttcaaaagaagacatattagctgcaagcagagaactgataaaagaaaacggatggactgctttaagcatacgagctgttgcatcccgatgttctgtttcggcggggacaatctacaattactatgaatccaaggccgatttgcttggggatacaattgagagtatttggcgtgaaatcttttttaaccctgaggatgagcaggcatttaacgatgttgctgcctgtatctcatggatttataaaagactggaatatggaaatgagcaatttccgggcttcttttctctgcattcgcttggatttatgaaggatgaaaaaatggatggaaagaagaaaatgctgcagacatgggggcatattcttaatggattgtgcgatatattaaagaatgatcctaagattcgtccagatgtatttgatgaacaattcacggaaaaacagtttgcagatatattattttctttaatattggtatcaatgattcgtcaggattataatccgtcttcgattttgatgttgattaacaaaacattatattaaaattctcccacattagagtgtgggaaattttttgaaacaaaatgaacaatgttcacttatacgtttaaagatatatctaagtagaaaggatttttattatgcaggcaattgtagaaactttatttgataccgtatatttgttttcggtaatcacaatcggaattttaatgattcgaaaaagcaaaggaaaccgtcagtttaccatgtttggaattatggcagttattttaggaagtggagatgcatttcatctggttcctcgtgcaacagcgctttgtacaacaggtcttgagaactttaccgtacagcttggtttaggcaagtggataacctccgtcactatgactattttttatgtagttctctatcatatatggcgtgagcgttatcagattaaaggctataaagcagctacagcagctatttatggtcttgcaggattaagaattgttctgtgtatgatgcctcagaatgcctggctcagtgcagaagctccgctttcctgtggaatctaccgaaatattccgtttgcactgatgggattaattatcatagttttattctataaaagtgcaaaagaaaataacgatagctcttttcgttggatgtggctgacaattgtcctaagctttgcattctatattccggttgtactgttggctgatgtaattccgatgatcggcatgctgatgattccaaaaacctgtgcatatgtttggacagtattaattggctacaaggcaatgaaaaaagacttagccattttttagtagttttattgtaacacagaacaaaatatgattttgatgcattatatgatgatgggaaagctcctaataagcataaaaagataatggtcaattttatggaggataatgctgattcagagatttattccaatgaattgaaaaaacaagctggatttggcaaggatggagaaaaaggatttgatggtgcaataacgaatcttatgatgcagacatatctgtgcaactgcgattttaagatatgcatgagatgtatccggaggcgactgataagcagataaggaagatattaaagtaatacaggtacatatatagcgatgaaggaatattaaacaatgtatttgaatagtacataaaaataaccatattgaatacaatctaaataaagataatttatgattgactttcttagttatatcagttatattatctttagtgatcagattgcagaaacttgagaagcctgcgatcgggggagggtgccgaggcccctctcctttttttatttggaacattttgcagcgaggtacatatgagcaaaccgtttattacatataccgcacaggttgaaaaactgaaaaatgaaaaagatctagttattacagatgatgactttgcggtagaatccttgcaaaatatcagttactatgcactaattggcggatacaagcatccttttattgatattcatacccgcaaatatattaatgaagcatgttttgaagatatagttgctctttatgaatttgatgaagagttacgtggaatattctttaaatatttatgtcgtgtagaaagaaaaatgcgttcgtccatttcttatcatttctgtaaaaaacatggagaacgtcaagaagaatatcttaactccaataattacggcaatattccaaaaaataaaaatggaattactaaattaatcaaaatgctagatatgatggctaataaaaataaggatcatgaatatcttgtttatcagcgtaacaaatatcataatattccgttatgggtgattatgaatacccttacttttggtcagatatccaaaatgtttgaattcttacctcaaaatatgcaaggagcaatttgtcaggattttggaaatatcaagaaaaatgaaatgataaaatatttaaaggtattaacactgtacagaaatgtatgtgctcataacgaaaggttgttttcatatcacacatatattgacattccagatacattgttacataaaaaattaggaatttctaaaaacggttcaaaatatatatatggtaaaaatgacttgtttagtgtagtcattacttttcgttatctacttccaaagactgattttttactgtttaaaaagcaattatggcatatttttgacagatatcaaaagcagaatttaaatttgaagttgaatgatctttttgaatatatgggatttccgtgtaactggaaagagataacaaaatttcgcaaaatataagtggagatatgagtaaaaatatttccgctaatatttaaagctattatatttttagcgatttcttcgaactattcaacccatccacacaattaaacaaaaaaaattctcatattaaattttttcatagaccaggcggggatacttcacatgtaccggcttcctctttgtaatggaaaaagtattgcgtaaagtaaataaatcagtatcatatatttatacacacaaataacggaaaagatatagaatacaaacggtatttacagggcaaatcaaattcgatgtaaatcggtttgatttgccctcgttttttagttcgatattgcagagtatcactccacagacacgcagtacgaacaagtctataattccttgattttttcattcatttttctgacatcattgcgatagtgaagcatgaagcctccccaaattataaatgccaaagctatttgaaatatggctgcaataattccgtggaggatagaacttgttcctcctatccatccgacagtatatgcgacgattgtataaataacacagcctgttcccatgtggataattactttaaatggcgttggaagattgtctttgtgataaatcatggtcggaagtccaaaacccagacccacaattaggcatccgataaccattttggaaaattggtaattatctaaactgaaattaccgtcataggcgatgtcaaataccattcctgtaacacagaaaacggttaatgctataccaatgctggttatagtgtttttaatcaaatttttcatagtttctctcatttttgtcctcctataatccaagatattttttaaactcaggcagatattttcttgatacgtaatccttacatccgttttttagtttcaaaagaagagtgccgctaaaaccagcctcgacattgctcatataagacagattgaccaaagttgatttagaaatttgcataaatccggcaccaagctgctgttgcatttcgtacagtctttttcgggaacggtagcggtgttctttgccataaataatagtatccttgttttctacccttaccatgtatatttcttttggctgtaaaatgacaatatcattttcgtttttaaaagctgtaatggggctttcatttgaaccgaatatatcaagggtacgctggatgctgtcagtgattttatctgcatatattatggcatatggttcgctgtattcaggggaaagttctatacttaccttcgtgtaaaatcctcctttctttttggtgagttaatcatacaatatttcatatataatgtctcgcatttggatgtaagtagcgaaaaaacatgtgtaagatgcgttaaaggaggataatcctgataagttccgctatcggaagatatgtgagtctgcacaccgtacggcacaatcaacatttgacatgttggaagttttagtgattaatatttctttaattttgtcagcatactatttacatagtacaaatagtaatgtactttaaaaaagtacaggacagtacaaataatcagaaagagatatgataaccatgaagaagaaattaattgcaataatagttggaatgatgctttgtgcagagctgttgggcggttgtggtaataaaaatataaacaaggataatattaccacggatactgccgaggagtcgaaacagcaggattcgaataaaaaacaggagctgccaactgcaacatatatgggtggaagcaataccattactgaggtgtgcgatgagcttggttcagccggggcatcgcatgtagatacctttaaagaatgggtgaccgattttgcggattcagccgggaagaatgcaaagctgaaggatacctggtcagatgcatataaaatgaaagcagatactgttaaatgtatggatggctgggagaaaaagcatgactattcagatgcagattgcagaatgacagcttttcttttgctggatgggctgcttcatgcacagtcaacggaagatagctatagtggcacatatttaatgtttgatacggaagcaatagataatgtagacaggtatgaaatcataaggcagaataaagacatgtttactacattatacggagaaaagagcattacggatgataaacatcctgaaaaaacattctctgacaactggaaaaagtatggatttcaaatagacagtaatcgtatttcacttattagtatagcaatatatgatccggattctgatgctatgttcgtgggacatacaggtgtattgataaagtacaatgactattatttgtttgtagaaaaaatagcatttgagcagccatatcaggcaacaaaggtgaataatatggatgaactattaagtattctttcactaagacctgagtatttcggagaagagaaagaggctggaccatttgtatataataatggagactatgttggaacattagaattgcaaagtgcagagttgtaataatgaaaattcaaaat

SEQ ID NO: 1557 - DNA, 703 bp, Unknown
  gut microbiota DNA sequence
caatatactttgtatccagcttcaccacttcctcaaagtctgtgatattacttctgccgctcacctgccacagtccggtcagtcccggcctgaatgacattcttgctctgtggtgtggttcatacttctcccactcgtcgagtgtcggtggtcgtgttcctaccagactcatatctcctttgaggatgttccaaaactgcggcagctcatctattgatgtcttcctgataaactgtcctacaccggttttttttgttccatccgacagtatcttgttgcctatgattcgcgggtcgaaatccatcttaaacatcattccgtcgctcaccttgttttgtgccatgagctccttctttcgctcctcggcatccatgtacatgcttctgaatttgtacatcttaaactttcttccgtttctgccgattcgctcctgtgagaagaaaattggccccggcgatgcgatatagattgccggagcaacaaatatggttacaagcattgtgataagacagccaaccagtccaccaagtatatccattgctctttttgcaacaagctgtgatgtgctcgcatagttcatacttgctgtgatgactgtgtagtcacctattttttctatctgattgaaattgcctgacatggccttgtttttagtgatgcctctgtgaactgctatacccatctctataaagcttgccaccat

SEQ ID NO: 1558 - DNA, 1131 bp, Unknown
  gut microbiota DNA sequence
tcttccacataatctgttcaatcagccacatgacatcagaaaaacgggtagccattaactcattggtatagtttgcgacaggagcagaatccttcatgatgcctttatagatttcagcagggatgatccaaagatcagtatctttttctgcttcaatggttacttcaaattgaatggatcgcatgatacatgaggcagataagagacacatatccatatcgaacagacggtagagtgtaatctctcgtccttcatctgaaagtatgtaagttcgaagctgcccggatttaaccagtaataatccagtacaatccatgttcccgttgtgaatgattgttccttttttcacatgctgtgtgatcaaattgtctgaaattagttttttctgtgctgtatttaagtcattccatagtggaaaataattttcgaagctcataatagttatctcctttatgaacatagtatacttgcttttttaatatgcgtcaatcgaataattgacatatgccctttataggactattatataagaaagcgagaaaggagcaatttcatgccgagaccagtaaaatgcagaaaagtctgccatttcccaaatgttttagaatttcttccggcagatgatactgagaaaaaaatgcccattgttctgacggtagatgagtacgagacaatccgtcttttggacaagaaaggttacagtcaggagcagtgtgcagaatctatgcagattgcaagaacgacggtccaacggatttacgagattgccagaaagaaaatagcagatgctctcattgatggacatccgcttaaaattgagggtggggatttcataatctgtgacggtcagagcagcgactgcagctttggaggatgttacaaacatgagatttatcaaaaatatgcagtagaaaaaggagaagatatcatgagaatagcagtaacatatgaaaatggacagattttccaacactttggacacacagagacatttaagatttacgatgtagaggaaggaaaagtgctacattcagaagtagtagatacgaatggaagcggacatggtgcattggcaggagttcttaatgcattaaatgccgatgttttgatctgcggcggaatcggaggagg

SEQ ID NO: 1559 - DNA, 2725 bp, Unknown
  gut microbiota DNA sequence
ccccaatagcgaattgaatgttgataccgattccacaatccggattggtatctgtgtccaggtgaagcagcggcttatcgccctctacagctcggtagatgtcatacatattgattttatctgccgattttgcaagagcggcattcgcatgaccttgtgtgttgacaacaatgcctgcatttttcagggttgccataagctgtctgacataagccgggtttgtcttgatactttctgcaatttttgtgctggagagttgttcgtcatctccaagagcaataaatataagaatatgaatggtgtcactaagttttgtggaatatttcatttgtcacctcgaattttcttcttgcaatttttaaacttacatgataatataattttaatgcttgatgtaattttaattttaacaagtaaaaaaataaaagtcaagcaaaataaaaagtgtggaatctgatataaaagaaaacatagtaggaaaggaaatgtgatgaagatgaatgtatatcaagagataagtcaaatcatcaaagaagcagatggtattttgattggagccagtaatggtttgtctatcgcagagggatataatatttttgcagatgacgcatggtttcaggaaaatatgggagatttcagagaaaaatacggactgcgctgtgttttacacggattttcggtgccaatgaaggtagaagaaaagtgggcgtttgtaagcagacttgttaaggcaaaagctatgcaggatgagccgagtgagattatgaaaaacatctatgcactggtaaaggataaagaatatttcgtagtaacttccaatgcggaggatcattttgtgccggcaggttttgaggcagaccgtgtttttgaaatggaagggaaattaacccagatgcggtgcaagaacagatgtcatgacgaggtctatcctaatcaaaaagcagttcttgccatgacagaagaggaagtaaacggaagagtacccaaagagttattgccgaaatgtccaaaatgcggtggagatatggaagtaaattggggtgcgatgtcctcgtttacagaaacgaaaaattggaaggaaaaggctgcccgctatcaagaatttattcagaatttacatggaaagaagctggtaattctggaatttggcattggttggagaaatcagatgattaaagctcctttgatgcatcttgcagcagtagaaccacaggcaagatatatcacatttaacaagggcgaaatttacattccagaggaaatcaaagaaaaatctatcggtgtggatggtaatcttacggaagcgttaaaggaaatcagaaaggaattctaaggaaaatgacaagagaagaaaaagcagtatattacaaacataatggatttaattgctgtcagtcggttatcaaggcaatgatcgatttatcagattctgataaggaaatactgacgaatgctgcatcaggatttgcggtaggtatgggaggtatggaagcaacttgtggtgcattgattggagcaaccatgatggcgggaattgtaaagccagggaagaaaagtgcgatgacggcacgcgagatattaaacaaatttcaggaatattctggtgcaaccatatgtaaagacctaaagggaaaggatacaggtgttgtactctgtgaatgcgatgattgcattcgcaatgcaatacgggcttttgacgaggtgttgccgatgaaatcagaaagtgaaggatagactaagtaaggtagttaaagatattacagttgtgagacaggagaatgaaaaaaatgagctgttacgaaaatttggtaatgaaaacacaaatgaactattcaagacactatagtatctatgcatccggcggtactgctgtagtgttgagcaaacaaaaaccacttccttatgaggaacagattcaggaatttgttcgcagagtgcaggaggcagagtgtatcatagtaggcggagcatccggtttatcagcggctggaggtggtgacttttattatagtgataccccttcttttcgtgagcattttggaaaatttgcagataagtatggattcaaaggtgcttttagcggaatgatgcatcggttttctacaagaaatgaacactggggatatgtggcaacctttttaaatactacacaaaatgctcctatcagagagccatatctggatttggataaaattttgcagggaaaggattttcatatcttaacgactaatcaggatacacagtttgtaaagatttattcggaagaaaaggtcagtgagattcagggagatcatcgtttcttccagtgttcccagtgttgtcaggatgaaacatgggatgccgtacaacctgtggcagatatgattgcggctatgggagaggggacaatggtgccggatgaactgattcctcgctgccctcattgtggtgcggaaatgtttccgtgggtaagaggatatgggaattttctgcaagggaaaaaatacgaagaagaatatgagaaaatttcaaaatacattcaaaaaaacaaagatagaaaaattctctttatagaacttggagtagggcgcatgacaccgatgtttatacaggaaccgttttggaaactgacaaacagcttgaaagacgcatattatgtctccgtaaattcagaatatcagtttttgccggaattcattgaagataaggggattgctattttgggagatataggaacagtgttaaa

SEQ ID NO: 1560 - DNA, 1183 bp, Unknown
  gut microbiota DNA sequence
caacaataaatacttttcggagaaagatgctcattattattatggcggtccgctaatgtattataaggcggacgggactagacaatttggaagtataatagaattgcagtctcaaaaagaagtagctatagaagatattacacctctagtgcgtggctcagaagctgattcattaggaactttaaatatcgataattttttaataaaaacaagggctgtatctagcgatagtatatctcattctactgcacgatacagttataatccagatggaagatgtggttctgttgcaggagccattgttttgaattattatgatcgatataagtcaccgtcatatgtacctaatagtttagaatcttcagatggcgttgctttgataaatgcacttgttgcaagaatgggaacaagtactaattacattgagttaaaaagaggattatcgttgtatattaagcaatactataaaccaactacagtaactgcaaatacatatagttggggagatagaattagaacaattattggtaaaaattatccatgcatattaggattgacatctcatccacgatatggagaacattgggttgttgtaacgggttataattttacatctcataattctggaacctatacagtaaatgatggatggggaaatgttggaataaatattaattcgagttgtacagatgggggtgttgatattgggtaataaatctgttgtaaaacgcaagtcgtatattacaatgttagtgtttatatccacgataattatactttttttaatagtgaatatgaatgaaaatagtagcaaaataaaggtaaaaggtggagaaggatatggtatgtttgataaagcaacaagaatagagattatatttaatgataatgaatatattgtatccaatccagatgaaattgaacaaataattcgtttgtgccgtcaaaactgggagccatcaaatactcatattacaaaggaagattgtgatatgtgtgttaagtttattggtacagatacagaggtttgggttgatactgaaacattatcatcatatataggggaaagttttgtacaaatgccagaagatttatttaaaaaaattaaagaagtagtctcgttaagtaatacacttcggagcatgccgatatttcaatgtatctacaaggaaaaaattctact

SEQ ID NO: 1561 - DNA, 320 bp, Unknown
  gut microbiota DNA sequence
ggtaaggttcttcgcgttgcttcgaattaaaccacatgctccaccgcttgtgcgggtccccgtcaattcctttgagtttcattcttgcgaacgtactccccaggtggaatacttactgcgtttgcgacggcaccgagaagcaatgcttcccaacacctagtattcatcgtttacggcgtggactaccagggtatctaatcctgtttgctccccacgctttcgagcctcagcgtcagttatcgtccagtaagccgccttcgccactggtgttcctcctaatatctacgcatttcaccgctacactaggaattccgcttacc

SEQ ID NO: 1562 - DNA, 3990 bp, Unknown
  gut microbiota DNA sequence
atattaaccatttatataaattttaaaaaatgaaataattagaacaaaaacctcaaaatatagtacaaatttatcattacaaaaattctgatataaaaagagcaatattaaacaaaaaccaactaaattaaacctaaaaccatgtcgtattttgtcgaaaactgctaatcacctatcaatattaaatcttctaatagaaatcttcaaaatacaagcgcgtaacgcgcctagaatattgatatattatatggaaaaatgaatccaccaacaaagagtgaaatttcgcaaaagcgacaaaatttcaaaagaaagacaaaaaaagaagttctacgaaaaatacaatcgatggagggatgaaatatttgggaagaatttattatgaacagaaaggacttattaacctcgatgatatcgtagatatatttattgaggtgggaaatatacacaattacctggaaaatgcagccttgcggattttgctttttggcaatcctgagctgaatttttatcagtgccgattattagtattgaagtacggagaatcactttcacaggatgatttgcacgggcggatggtatttatgagaatgatacagctgctggaagccaacacagtttaaaataaaatgagaatttcttttttgaccgggcaaccggtctttcttttttgcacaaatggtgttataattttgaagaaattatgttgattactcatagctttaaaaaagaagcactgcattgtgtttaattaaaccaaagcatgataattcaatcaaagaaaagaggacaaaaatgaacatcgtagtacttgccggagggctcagcacagagagagatgtttccttcaagacaggaagcatggtagctaaggcgctcaaagagaacggccacaaagttatattattggatgtatttatgggatatagtgacagggaggaggacctgacaggtatatttgaccgcgcggacgagataagcgtgcaggtcagcgatattccgacagaggcacctgacctcgcaaaggtaaaggcttccagaaaggaccagtcaccttgcttcttcggaccaaatgtcatcaaaatgtgtcagatggcggacattgttttcatggctctccacggagaaaacggagagaacggaaagatacaggcagcatttgacctcttcggtgtcaaatatacaggcagcgattatttaagctcagccatcgccatgaacaaggagacatcaaagcagttcttccttgcaaacggtatccctactccaaagggtatttccatgacaagagcgaccagacaggacgatatcacaaagcttgacctgacacttccatgcgtggtaaagccatgctgcggcggttcaagcatcggtgtcaccatcgttaaggatgcggcagagttcaaggcggcacttgacgatgccttcaagtgggaaaatgagctggttatcgaggagtttgtacagggcagggagttctctgtcggcgttatcgagggcaaggctcttcctattatagagattgcaccgaaggagggcttctacgattataagaataaatacaaggcgggcagtacagtagagacatgtccggccgagcttcctgagcaggtgacaaaggatatgcagcactatgccgaggaggttgcgcgtgttatcgggcttgacacatattcacgctcagactttttactcaatgacaaaaatgagatgttctgcctcgaggcaaacacactgcctggcatgactccgaccagtcttctgccacaggaggcagcggttatcggcatgagctttaatcagctctgtgagcatctgattgacatatctttgaaaaaatatgaggtgtagcatgtcgaataagtacatgaagaatcttacatttgcaaatattgctaaagcctgcgagggcacatacataggcgatgagacacagctcgatacgacaatcaccggcgcagtcattgacagcagacaggtgaaggagggctatctttttatcccgataaagggagaaagggtggacggacacagattcattccgactgtgtttgagcagggggcggcaattgtgctctctgagcatgagctgacggatccggcaggcccatatgtgcttgttgaatcaaccaccgatgccatgaaaaagctcgcggcattttacagaaaaagccttgatatcaaggtggtgggtatcaccggaagtgtcggtaagaccagcaccaaggagatgatatcgtcagttcttgagcagaaatacagcgtccacaagaccgcaggtaatttcaacaacgagataggcctgccactcaccattttcggaatcagggaaagccatcaggtagcggtgctcgagatgggcatatctgattttggcgagatgcacagactttctactatgtcttgcccggatgtcatggtcatcacaaatatcggctactgccatctggagtttttgggcgacagggatggtgtgcttaaagccaagacagagtgctttgagcatatgatgccggatgcggtcgcagtgctgaatgcagatgacgacaagctggccacagtgcagacggtaaatggaaagcctgccatatactatggcaaggaatcggcttcggacgttcataaatcagtatataccacaaatattgaaaacctgggctttgacggaatgaaggctcattttgtcactccggagggtgagttcgatgcacacatccacatcccgggtgagcacaatgtatacaatgccatggcggcagcagctgtcggattgcagcttggcctcacaatagctgagataaaatcaggaatcgagaaagcagagacaatcgcaggccgtaccaatttcatcaaaacgcatggcatgacagtgatagatgactgctacaatgcaaatcctgtatccatgaaatcctctatcgaggtgctttcacatgcaaagggcaggacaatagcagtgcttggcgacatgggagagttgggaagtgatgagaaaaagctgcaccatgaggtaggcgaagcagttggagagaatcatatccatacactttttgccgcaggagagctggcaaaggaatatgcagccggagcagcggagaaatcatccgatgtagacatccactatttcgaggataggttgaccatgacacaggagcttctttcatatgtgaaggagggcgacaccatactggtgaaggcatcgcacttcatggagtttccgaaggtggtagaggcactgagtaaataaaaataaggtgaaaactaatcagtaaaaattaattcgatatttaataattgcgagggatggatattctccaagcctcataatattataaaagaaagagagaaaaataatggcacagaatccaatcgtaacaatcacaatggaaaacggcgatgtaatcaaggcggagctttatccggaaatcgcaccaaacacagtaaacaactttatcagcttaatcaatcacaacttctatgacggagtatgcttccaccgtgtaatcaagggctttatgctccagggcggagatcctgacggaaacggcacaggcggccctggctatgaaatcaagggtgagttcacacacaacggtttcaaaaatgacttaaagcacacagccggtgtactttcaatggcacgtaccatgatacctgactcagcaggcagccagttcttcatcatgcatcaggatgcaccacatctcgacggcgagtatgcggcattcggcaaagtaatcgagggcatggatgtggtaaacaagatcgctgaggtgcgcacagactacatggacaaaccacttgaggctcaggtcatgaagacagttacagttgagaccttcggagtggactatccggagccggagacagtttaatgataataattattgatgaggcaagcgcaaaacttgcctctttttactatcatgacgagatattcaagctgcagtggagaagtgtggcaggcaaggcatctatgtcagaagagctgca

SEQ ID NO: 1563 - DNA, 24082 bp, Unknown
  gut microbiota DNA sequence
aactgccagatgagcagcagaataatttgtgtgtgtatgaaataaaaaataattcaggatatacagaatctgcagataacaccgcgaaagctaatatgggaaatcaaagaatcccgaaagctcccacagactgcatctggatagtctcaaaccggcagcagaagcaaatagctgactcgctcggcatagcatcagtaggagaaccgcagtgcggcacgcgctatgcagtcgagagccttgcagagcttgatattgagtatctggagcgggtgcgcaggcggtataatcacatcccgtgggacatcggtgagacagacaggtgtctgatacgtgagctgtccctgtcagaccttcctgcgctctatgagctctatgacaagcccggcatgacagactttgtggagccactttacgactatgagacagagcttgaataccagaaagcatatatagagaacatgtatggcttttacgagtatggcatgtggcttgtattttccagagaaacagggaagctgataggacgggcagggcttgagcacaatgaaatgggctacatgatagaaccggaattatggaaccaaggctatgccacggaggtgtgccgattcatcatagactacgcgcgcgaaaacacagactttgaagagctttactgccggatagacgagaaaaatacggcatcggtgcgccttgccaaaaagcttggatttacaaatagcgggcatatggatgatgatataaacgcttctatatatagaaaaaatataaaaaacataaaaaacaatgaaaaacattgaaaaatatgcaattaggcaataaaatataaacatagtttaacgatttggaggacgaaaaaatgaaacaatacgcatatggagtagatataggtggaacaactgtaaagataggcttttttgagaccacaggaaagcttgtcgatacatgggagattcctacacgcacagagaattcaggcgagctcatcctgcctgatattgcagcatccatcaaggaaaataacgagaagcacggcatcgagatgggtgacatcgagggcgtaggcatgggagtgccgggacctataaaggatgacggaacagtattgaagtgtgtcaacctcggctggggtgtgttcaacgtggcacagtcactctcagtactgtgcggcggcatcaaggtaaaggccggaaacgatgccaacgtagctgcgctcggtgagatgtggcagggcggtggaaagggccatcaggatgtagtcatgatcacactcggcacaggcgtaggcggaggaatcatccgcgagggcagaatcgtagccggaataaacggagcaggcggagagataggacatatgcctatggtagatgatgagtcagagtgctgtggctgcggcaagaagggctgcttagagcagtatgcatcagcaaacggtctcgtaagagtggcagagagatacattgcagcacacagagatgtggcaacagagcttgatttaaatgcaggcttcacagccaaggatgtatgcgatgcggcaaaggcaggagatgcagcggggattgcagcagtagagcagtctatgaagcttctcggcaaggcaatggcagcagtagcatgcgttatggaccctgaggtatttgttgtaggcggaggcctttcaaaggcgggcagcatcatcatagatacagcagcaaagtactataaagagtatgccttccatgcaagccgtgagacagaaatcaagcttgccacactcggcaactcagcaggcatgtatggcggagtaaagatggttatcggctaacaacataagattgcaatttttaaagaaataaaatataatggctactaaagatacactacaatcgaggtgagactattggcagattactcaacagaagaattagaaaaaatagcggacaaatttcgctcagataccagcggtataaggggaacaaaggattttacgagcccagaggagctttacgatgagctgaaaaaggaaatcaaaaagtaccatccgtcggatgacactagccttgtggacaaagcctacagggtagcttatgatgctcataagggtcaggcgcgtaagtcgggagagccttatatcatacatccgctttgtgttgccataatactcgccgagctcgagctggataaggaaacaattgcagcaggactgctccatgatgtgctggaggataccatcatgaccatggatgagatgcgcgcggagtttggagacgatgtcgcacatctggtggatggtgtcacgaagttaaagcacctgcatctgacagacagcaccaaggatccgaaggataagaatgcggacaggcttgagatgcaggctgagaatctgcgcaagatgtttctcgccatggcaaaggatatcagagtcatcctcataaagctggcagacagactgcacaatatgcgtacactcaagtaccagtccaaggaagcacagcagcgtatcgccagagagacacaggatatctactgccctatcgcacagcggcttggtatcagcaagataaagatagagctcgaggacctttgtatgaagtacctctatccggatgcctactatgatctggtagagaaggtagccctcagaaagacagagcgcgacacctacatccagggcttggtaaacgatgtcaagaagtatgtttcagatgccggtatcaaggcagagatatacggcagggcaaagcatttcttcagtatatataagaagatggtcaatcaggacaagactatagaccagatatatgacctctttgccatcaggattctggtggataccataccggactgctacgcagtgcttggtatcatacatgagaagtataagcctataccgggccgtttcaaggactatattgccatgccgaagcagaacatgtaccagtcgcttcacacgacgctcataggcccgagtggacagccgtttgagatacagattcgtacctacgagatgcatcgtactgctgagtacggtatcgcagcgcactggaagtacaaggaaacaaacaacggcaatgccactaccaccactgtcacagaggaggagaagctcagctggctgcgccagatactcgagtggcagcaggacatgtcggataataaggagtttatgactttattaaagagtgatttaaatttattttccgacaatgtatttgcattcacaccgtccggcgatgtaaagaacctgccaaagggctccacacctatagactttgcctacagcatacactctgcggtcggcaacaagatggtcggtgccaaggtaaacggcaagctggtgccgatagactatgtcatcaaaaacggtgaccagatagagataatcacctcacagaactccaagggaccaagccgtgactggctcaaggttgtaaagagcacacaggccaagaacaagatcaaccagtggttcagaagtgagctcaaggaggagaatatacagcacggcaaggatctgatagcagcctatgccaaagcaaagggtatcaactttgctgagataaacaagcctgagtatcaggagaaaatacgccgcaaatacggcttccacgactggaactcatgccttgcaaccgtcggacacggcggactcaaggagagccagatagtcaacaggatgtacgacgagtacaagaaggatcatgtggtgccggtgacagatgcagatgtgcttggcagcatcgcagaaaagcagcaggcggcagcaggcatacagccggagcacaagtcaaagagcggcattgtggtacacggactctatgacgtggcagtacacttctcaaagtgctgcaatccggttccgggagacgaaatcgttggatttgtcacgagaggccgaggtatctcaatccacaggacagactgtgtgaatatcatcaatctgtccaagatagaaaaggacaggcttatagaagcagagtggcaggatacagccctcatggacaacggtgctgagtatcaggcagatctaaagatattctgtcatgacaggccgggactgctcgtagatatcacaaagatatttaccgagaaggaaatcaatatcagtggtatccagtccaagaccagcaagcagggcatcgctacaatcgaggtattttttaatatcaaaggcagggaccagataaaggttctagtggagaagctcagacagatagaaagtgtaatagacgtagagaggaccaccggctaaatcccggtggttcttgcgtgaagcataacatataacagacaaggagtacactcatatggtaaatatgaagatagaccacttcgtagtgggaccggtgcagaccaactgctactttgtcaccaatataaagacaaaggaaatgataataatagacccgggcgcgtgtgctaaacagctcgccaaaaaagtggacgaatcaggcgcaaagcctgtagcaatactgctcacacacggacactttgaccatgccacggatgcaaagccactcgcagaccgctacggcatcaagatatatatccatgaggcagacaaagccacacttgatgacccgcagctcaatgtcagctacatgatgggccagtcaaagaccttttatgcagatgtatttttgaaggataagcaggagcttgacatcgcaggatttcacatagtagtgcttcatacaccggggcatacaccgggcggctgctgctattatttcccatatgaggacgtgatctttacaggagactcactgttttgcggctcaatcggacgtacggatttcaaaggtggcagcatgtcagaccttgtgcgcacggtgaaggaaaaaatcatgacactgcctgagcatacagaggtgtacccgggccacaacgacacaacaaccatagaaaacgagaggatgtataacccttacttatgatagtagtagtatttaataaaccggattttgaatatgatgtgcactcactgctcaaggagttcttcccgcaggaggacgtgcagatgtactatagctgctcacctgatgaggtggaggggaaaaacttagcctgcacgcaccacgagatgacagatgatggcgtaaaggaatttgcggatgcctcacaggtatttaagatagactatgtgggcgatgaaattgcagtggagtggacgctgaatagagctggtggaaataattccatgacagatgagatgcagcaagccgacgaaagtgacattaaaacagctggaaaaagtatctgcacaaaaatatccgtgaccggaacagaccgtaaggaaaccaaaaaccgcctcaagctcgccatgtattccatgatagaaaagggcacaggaaagagccttccgtggggcacactctcaggtatcagaccgaccaagatagccatgaagtgcatagaggacggcatgagcgataaggaaacctacgactatctgaaggaaacctatctcgcaagtgatgagaaaatcaacctctcaataggcatagcaaagcgtgagaaggcactgctcgataaggtggactatgacaacggttacagcctgtatataggcatacccttctgcccgagcacctgtgcatactgctcgtttacctcatacccgcttggcgtgtggaaaaaccgcgtggacgattacctcgatgcactcgagaaggagatagactacacggcacagaaattctaccacaggaagctaaactccatctacataggaggcggcacaccgaccacactaagccctgcgcagcttgacaggcttatcagaaaaatcaaatgcagctttgatttaaagaactgcctggaatttactgtggaggcgggcagaccggactccatcacgagagaaaagctcctggcactgaagaaaaacggcatcagccgtatatcagtaaatccacagaccatgaagcagcagacactcgatataataggaagacaccacacggtagacgatacgatacaaagcttcaagctcgcgcgtgagctgggctttgacaacataaacatggacctcatcatgggacttcccgaggagacactcgatgatgtaaggcacacaatggagctggtgaaggagctggcacctgacaacgtcaccatccattcactcgcagtaaagcgagctgcacgactcaccatcttcaaggaccgttacagtgatatgcagatggtcaacagccaggagcatatggatctctgcgcagcctactgtaagcagatggggcttgagccatactatctctacaggcagaagggcatggcaggcaacatggaaaacgtgggttatgcggcaaagggcaaggccggcgtatacaacatactgattatggaggaaaagcaaacgattgtggcgtgcggagccggagcaagcaccaagcgcgtctggccggtaccgaatccggatggcacccaccgcatcgacagatgcgagaatgtcaaggatgtagggcagtatatcgcaaggattgatgagatgatagagcggaagcagaggttgtttgaggagtaataagcagcatgacatataataatgtataattattggtgctgtaatatcatagcgattagcgaatacgtcgaaaattgtaaagaaaccatgagattcattgacaaagtataaaaaatgagcgaaaatatattattgaaaaccctgattagatacagaaaaagatacaaataaccgaataaaacatacgtaaaacaaaataggctaaaataattcgggggggggtacaaaggtatctcccctagaacaggtataaaggaaaataaaagataccacaaggagaatttggaaagaatgtacagaaagaaaggcagaggatggacaaagcatatagattttatgcttatagatatcgcatgcattgttatagcattttttatttcatatgtgatacgcttcggctttaataacccatatgtggacaaggactaccgtatactgggtgtagcatttcttctgatagatttctttgtggagataatggcagactcattcaagaacgtcctaaaacgcggatatctggatgaatttatatcgacatgtaagcatgcagtgcttgtatttctggtgacagcactatttctgttcaccacacagatggctgatatatactcgcgattatcattctatatcatgtttccaatctatgtgacaataacatatgtagcaagggtggcgctcaagagctttcttaagaaaaagggctttggagtctcaagaaaatcactgtttgtcatagcaccgaaagcagtgcttcgcgatacactgcgcacagtggagaaaagctgcataggctacacaaagatagtggcggcagcactggactcagatttgaagggcaagaccatatgtaacataccgatagtagcaaaccacgatggcatagtggactatgcgtgcgatgagtgggtggatgaggtgctcatcccgccgtgcagcgaggatgaatatccggagaggatggtagatatattccttgagatgggaatagccgtgcatacaggaataacaaagaatggtactgcccgaggcggttacaagcagatagaaaagataggcgactacacagtagtcacatcaagcgtgaactatgcaaataccagcgcacttctggtaaagaggggcatggatatagtcggaggactggtgggctgtctattcacacttatcatcatgatatttgtaggaccggcgatatatatagcatcgcccggaccgatattcttcgcacaggagagagtcggcagaaacggcaggaagtttaagatgtataaattccgcagcatgtacatggatgccgaggagcgaaagaaggaactcatggcgcagaataaagtgggtgacggaatgatgttcaagatggacttcgatccgagaatcataggcaacaaggtgctgccaaacggaaagaagaaaaccggaattggacagtttatcaggaaaacaagcctggatgaattcccacaattcttcaatatactagtgggggatatgagcctagtaggcaccagaccgccaacactcgatgagtgggaaaagtatgaaccacatcacagagccagaatgtcattcagaccgggactgaccggactgtggcaggtgagcggcagaagtaatatcacagactttgaggaagtggtgaagctggatacaaagtatattggggagtggagcgttaagggggatataagtattctctttaaaacagttatgggcgtactaaagagtgatggagcagtgtaggtttatgaatattattttgttgtcaggtggaagtggaaagagactctggccgttatcaaacgatgtgagaagcaaacaatttattaagttgtttaaaaatgaaaaaggtgaatatgagtcaatggtacagagagtgtaccgccagattacaaaggttgacccggaggcaaaggtgacgatagctacaagcaagtcacaggccagcgcgattaaaaatcagcttggcgagaatgtatcaatatgtgtggagccatgcaggagagatacgttccctgcaatagctcttgctgctaattatttacatgatgtgcttgatgtgaaagaggatgagcccgtagtggtatgtccggtagacccatatgtggaggatacctactatgaggcagtgaaggagcttgcagaattggcacaggcagggaatgcaggattgactctcatgggaatagagccaacatatccaagtgaaaaatatggatatatcattccaaaggatggagataacgtaagtgcagtaaaggaattcaaggaaaaacctgatacagagacagctaagaaatatctggcacagaatgcactctggaacgcaggaatatttgcattcaaactgggatatctgatagataaggctcatagcatgattgattataaagattatcaggacatgtttgatagatatgaccagatgacaaagatcagcttcgactatgcagttgtggaaaaggaaccaagcattcaggtgcttcgctatagcggagattggaaggatgttggaacatggaatatgatggctgaggtaatggctgataaagcaaaaggcaaagctatcatggatgagacctgtgagaatacaaatgtggtaaatgagcttaatatcccgattctttgtatgggatgtaaggatatgataatcgcagccagcggagatggaataataatctctgacaaagagcgtagcggatatatgaagccatatgtagagaaaatcgagacagaggcaatgtttgctgaaaagtcatggggaacatacacagtcgttgatgtgcagagtggctctatgacagtaaaggtatctatgaaggccggagagagtatgagctaccatatgcatcatcatagagatgaagtgtggacggttgtttcaggaaaaggagttgtcactattgatggagagaaacaggatgtgaaggctggagatgttgtgacaattaaggctggatgcaagcatatggttgaggcagttactaatctggatattattgaggtacagcttggacaggaaataagtgtggatgataagcaaaagtgtaccatggagaattaaattatatggctagaatgaagtttatgaatactgaaattgacaacttgacaatgcaagagactttagatgcgattgacaaaataatagctaaagagaaaggggaatatgttgtaactccgaatgtagaccacatagttcaactggaaaaagataaagaactaaaagcagtttatgataatgcgtcattgattctgactgatggaaaacctcttttgtggatagctaaatggtatgggactccaataaaggagaaaatttcaggatcagatttatttcctctattatgtgaaagatctgcacaaaaagggtataagatgtttttcctaggtgcaaaagagggagttgctgctaaagcagcagcaaatttgatgaaaagatatgagggattgaatgtagtagacacctattcgcctccttttggatttgaaagtaatcagttagaaattaacaaaattaaaaatatgattacgaaatctaaaccggatattcttattgttggtttaggctgtccaaaacaggaaaaatttatgtatcactattgtaaagaattggatgtcccaatttcatttggacttggagctagttttgattttgaagcaggaaatataaaaagagctcctaaatggatggctaatcatggacttgaatggttgtttagaattacacaggatccaaaaagaatggcaaagagatatttagtggatgatgttaaaatactgggattgataaggaaatataagtagaatatgaaattagaagatcaaaacattctatttcttacaaggacaatggaacttggtggaacagagaatgttgtattacaattgtgtgaaatatttaagcccctggtaaataaggttgttgtatgttcctgtggaggagttaatgaacataagcttcaagaaatgggaattaagcattatataattcctgatatatcagaaaaaaatccacgctctatagttaagacgattattacaataaaaaagattgttgataaagaaaatataacattagtccattcacatcaccgtatggctgctttatatgcggaattgatatgtggaaagagtattttaaaaattgctaatgcacataatacatttcacgacaagaaaacactaacaagacttgcgtatagaaatacaaaattaatagctgttggtgaaatggtaaagaaaaatcttgttgaatattatggaataccaaatgagcaggttacagttatacataatgctattaagccgtttgacggaaaaataagcccaattcctttattaacagagtatagggaaaatggctataaaatcataggcaatgtaggaagactttcggagcaaaaaggtatggaatactttattaatgcagtaccaggagtgattgaaaagtttccaaagactaaatttgtgattgtaggagacggtgaagacaaagacaaacttgtaaatatggttaaacaaatgaatctagatgaatatattacatttttagggtatagaagtgatatacagaatgtaatgagtcagatggattttatagtattaagttcattgtgggaaggattaccgcttactccgattgaagctttttctgtaggcaagacggttgtagcaacggcagttgatggtacaccggagatagttcaaaatggaataaatgggattctgataaaacctaaggatattaaagaaattgtaaataatatttgttatttattgaataacatagatgtgcttaataaatttcatgttagtgcaaaagaacgatataatgcggagttttcttttgaaaaattaagaatgaactatattggattttatagaataatgtaaatattttaaataaaacgaggattatatgataaaaagaataaaaaatatatgtagaagatggtggggacaattttggtattttagtccaatgattgccattggagattttttatgtacaacaattttaagaaattctaatggaaagctgaaatataaaataatacagtcttattatgaaagagcaaaggaaataattgcaaaaaagtataaaaatattatactcaaatgggaaaatgtttctttaaataatcaaaaaattaatttaaatgataatatttttattttttggtggcaaggtattgatgatgcaccaccaattattaaaaagtgtatttgtagtataaaaaagaatgcaggaaagcataaagtaatattattggataagtctaattattatcaatatgcaaatatccctaaatatataattgataaagtaaataatggaaagataaactttacactattttcagatattttaagatgttgtttattatatgaaaatggtgggatatggattgatccaacatgttatatgacaaagcaatttgacgaagaaatgtataagaatagtttttatacaattaaacatggagatgactgggaattcccaatttgtaaaggatactgggcaacattctttttagcatctactaaaaaaaatccattaatgggatttatgagaaatttgttttttgaattttggaagaatgaaaaatattttattgtttatttgtcaatagatctttttttaagtattgcttatgatgaatttgattgggctaggaacatgatacagaatataccttataataataagcatagggatgatttgagaaatatgcttttaaaaaatggcgggaaaaattttgaagaattatgtcatcaagtgaatgcggatacatatattaacaagctgacatataaaatgtttattgaagatgttacatatgaggagaatgcactatatgattaagacgaaaaaagatttaaaagaatatatggaagcagatcgtaagcaattgggagtgaatagaaaatatcctaggccttttactgatgaaatatggagatatgaaatttatttgagaaaatatgaatactatctgaatactcaaaaaaaatattaagtatatggtataagatagtgcttcacaagctaggggtaaagttaggaataggaattgctccaaatgtttgtggaaagggattgagtattgcacattatggctgtatagaaattaatgacaaagcaaagataggaaataacttaagaattcacgagggagttacagttggtgcgtctggtggggatgcgcctgtgattggaaacaatgtgtttttgggaactggatgtaaagttataggagctatttctattgcaaatgatgtaacaattggagctaatgcagttgtcgtaaaaagtattttagaagctggagttacatatgcaggagttccagcggttaaagttagcgataataattcgtatcagtatgttttttggatgaagtagttaaaatttatattataaaaacagaaatgttatatttaagattggagaaattatgataccaaaagttattcattactgttggtttggtggaaatccattaccgtatgaagtcaagaagtgtattaagtcatgggaaaaaatgtgcccggattatgaaataaagcaatggaacgagagtaattttgatatatcagataatacatttgccagagttgcttatgagaataaagcgtgggcttttgtttcggattatgcgaggttgaaaatagtttttgattatggtggaatctatcttgatacagacgtagaattattgaaatcgttagatcatttattagataacaagtgctatattgggatacaacaggcacaatcattatgtcaaactggtttaggctttggggctgaaaagaatagttatattgtcgaaaaaatgttagaaaaatattccaatattgaatttgatgtaaataagaaattagaattagcctgccctattttgaatagcgaagcaataagttcaattggaacttggaatatagataatgttaattattgggatgagattacaatatatccttctaaatattttgatccgtatggtggtaaaaatttgttgtgtaaggatacaatttcaatacatcattatagtgcaagttggactagtggaagacaacggtttaagagacgtttagctaggttaattggaactggcaatgttacaaatataaaaagtaagttaaagaatttgagtaattagatgaaaatatatcgcaaattgtactaaattgacataagaaaaatttatacgggagatagtattatatatgtacaaagttaaaatttctactaaagatgttttgccttttttatactgcatttttataacaacgtattattctttacgaggatggaaatttaataatgctataataggaattcttttatttttaggcgtcatttttgggtgccttcaaatttttaaatatattgaaaataaagtaatatcatctataatactagtctttcttatattattaagtgtatatagaatgagtcttggaagtgacactagattaattatatcgattatgtcaatttttgttggaatgcatgttgaattttataaaattgtgcgttggattttatatgtaaaaggacctgtagttttatttgctatagtatttggcgggtacacacatataaattatgtagcaatgaatatgggaacgctagttttgctagagctatattataacaaagacaatatatataaagcgttaggcatggcaagtgtcttatatatattaggaagctttcttagcaagagtggttcatttattatttgtatttctttagcaattgttttgtatgtacttagtaacataaaagttggagaaaaaataatacatagccgactttggataggtatttttccaatttcattactattgaatttagtattggtttggatatattcagcttatgtatattcatattcagatacgtattttataagaaatctgtttccaagtgcaataaatggaaatctaaaaatgtttatcatggcattcaatcagtttgtatcaggaagaattaaccttgctgccttctcattagagaagtttggatatagcttttggggtggtaatttggattataaagttgatacaggattaccatatttcttagtagattcaggaatgatattattattacaagattggggatttttaatgatgataatatcaatggtaatttttgtatttatgatgtggagattttggaaaaataggcaggatatattaattataacgggaatagtagttgctttgtggtctatgaacgaggatgttttaatttctgttggtatgaattttttgttttttgcaataggagctaatttagatatttcaaagataaatgatagaatgagaaggagaaagttagaaggttgaagataagtataatagtacccatatataataaagaatcatatttggataaatctcttacatctatttcagaacaatcatataaagatattgaagtattattgatagatgatggttcaaccgattcaagtggtaaaatatgtaaatcattttgtgaaaaagatagcagatttaaatacatttataaacaaaatggtggggtatctagtgctaggaacgctggacttattgaggctacaggcgattttattggtttcgtggatcctgatgattttattaataaagaaatgtaccatacattaataaatcaagctgatattgatgaacttgatatagttgcttgtggaattaatataattgatggtgataatgtaactaagatagtaaacagtgataatgaatattataattcatgtaaagcattagaaaatttacttagatggtcatatgatgtatctccatatctatggaataaaatttttaggaaaaatgttttagagggtattaaatttgatgaggcattatcagttggcgaggatagactgtttatttttgaaaccttactaaaaattaggcggtacaaagtaattaataagtgtttatattcgtatgtaagaaatgcagattcgcttgttggtttaagttataatggtaaggctgcaaaaagttcaattaattctgattataaaatacttagcttatgtaaggaaaaatatcaatcatatgttgaaatggctcaatgtagcttaggcttaaacgcatattttcaattgtgcagaataataaaatcctcaaagtatgaaaaaaaagaagagtataaatattataaaaatatttgtagacaaaataaaaaaaatatcaggaaatatatagatttttgtacatattcaaaatttcttatagttgtatatatgcctttagtatataaaattttttaaaaaaattaattttagagagtatatgtatatataaatttgaatctatttaatgattttgattatatggatttagtaagaaaggaatatgagaaatgaataaaaaagtactattagtaacattgtttgatgaaggtaatattgggaatagactacaaaattatgcacttcaaacaaaattgattagttatggtgtagaagtgactacattagataattattatactacagatttttctacatcttttaaattaaagatgcttataaaacgattactaataaatataggttttaaaaaatataaaattgattatgaaagatatcaatcacttaagaatattatgttaagtaatattaattttgataatacaaatttatacaatgtaatcaaaataaaaaatgaagattcttttaaacatgattggtcgcagtatgaattggcaatttcaggcagtgatcaggtttggcataaatggaaacatgatttaaacgaattaccatactattatctagaatttatgcctaaagagaaaagaacatcgtacgctgccagttttggatttgaagaatttcctcagaatgatatagaacaacacattaaaggattacaaggaatgaataaaatttcctgtagggaacagagtggatgtaatcttgttcataagtatgtcggaaaagaggctgtgagagtattagatcctacattattgttaagtgctgatgagtggaggaatattgaacataagtcaggtgatattcagattattaatttgaaaaaaaaatatgtgtttatgtatttcctaggagaaattactgacgaatattatgattttattaggtcaactatggaagaaaataatataaatgaagtatttgatttctttgatgagtcgaaaagtcactttgttgaaaaaggaccttcagagtttatcaatttgatcgataatgcggagtatgtttttacagattcttttcattgtacagtattttcattactattcaataaaagattcaaggtatttagacgtcagcagactggttttgaaaagatgtttggacgcatagaagacttgttggcaagtaagggagctttagagcatatttatggtgaaactgaaattaaaccaacaaatgattttgataagttatataatgattcaattaaatatttagaattgattttaaatatataatagtggaaaatatattgataaattatatatttatgttttacgggatagaaggggatatagtttcttaacaactctgttataccatggccattgaggggttgttttttagtgacaaaaagccgtatttatgcggcttgtggcgtttcataaacgcctattacttataattataaggaggaaagattggtggatactagtcgaactgaatatgtcaaaaagaatatattatatggatatatcagtactgtaatatcatctgttttttcaattataactagaacgatatttgtttatgtactaggagctgaatacctaggagtgtcaggtttattttctaatgtacttggcgtactttcttttactgaattgggaattggctctgcaattgttttttcgttatataagccaattgcggaaaatgataatgaaaaaataaaatctctaatttcattatataaaagggcgtatcgtcttattgctatagttgttacgatgataggacttataatcataccttttttagattatttggttaatacagacatacctatgtcggaaattagggtatattatattattttcctctttaatacggtatcatcatattttgttacatataagacatcatatgtttcggcactacaaaaagaatatattgtaactaatactacaaccatcggtactatcgttacaaatgtgatacaaataatttttcttgtagcaggtggaaattatttatcatatttattaattgccgctataataggacttttacagaaaatattaactgtaatgtatttaaataagaaatttcccattttgacagaaaatgatgtgaaacctttagatacagaaacaaagaacattatatggaaaaatgtaaaggcacttattatacataagataggagatgtttctgtaaatcaaacagataatattataatttcagcatttgtaaatacaactgcagttggtttgttgtcaaattatacgacacttaacacattggtttctatgtttacaaatagatttttttctagttttacagctagttttggaaatatgcttgcaaaagaaagtgttgaaaaacaaaaaaaaatatttgatatatatgatttgttaggattttggatatatggattcgtattaattgcatttgttacattgtctcagccttttgtacagctatggcttgggaaaaaactattattagataatgtaacaatgatattgtattttgtttcattatatttggctggcatgacatttattccatataactttaaagttgctgccggaagatttaatgaggataaatgggtggcattttgtcaggcggttgtaaatttggttgtgagtattattgcaatcaaattaataggacttccaggtgtttttgttggaacgattatttcaagaatgatagttgttattgttagaccatatattgtatataaatatgtattgaggcaaagcgtactatattattatattagattaactattcgaacgattatagcatttggtatatgttttgttatgtggcaaataaagagagccattttagttaatgtcactattgtgagttttgtaataatatgttttttaacagctttaattcctaatttactatttattttgatattcgcgcgtactgacgcatttaaaggtattatagaaaaaataagaaagtgatatagcatttatgaaaagtaatattgtaacattaatagcaccattttataatgcagaagattatttagaacgatttttaatatctttacttggacaaacgtatattaatgttcaagtcatattggttaatgatggttctgatgacaatagtgatgatgttgttaaaagatatacagataaattgaaagataaattttatgaatttatatatttaaagaagaataatggtggggctgcttcagcaatcaattttgctcttaaatatgttgaaggagaatacttgtgttgggcagattgtgatgacgaacttttgccagataatatctatctgaaatggaaatttttgagtgaaaatttggattatggtttagtaaattgtggagctgtagccgtcaatcagattacaggtgaagaaattgaaaagttaataatacctgataacgaaaaaaaagataatatgtttatgagaattatttctggaattccagcataccctggagtttttatgattagaacaaagttattatttgataaattggatgatagagaaatttattataatagagaagcaggacaaaattatcagttgttacttccggtagcatatgatagcaaatgtggatttatagataatgtgttgtataaatattatgttagaatggattcacattcacataatgttgactattgtaaaatttacaaccggacatttgttagagaagaactgcttgataatgtattaaattttatgaatacaaatgataaagataatattatgagggtaataaagaaggagtcatgcaaacagcggtttaaccttgcattcgtggaaaatgatagagaaaatgctaataaatcatatatggaattgaaaaagttttcaatttcatataaagaaattttgaaacatttaattataaatgttggagtgttaaataatttgtatagattgagaggagaaagatagtgagagttttaattacgggaggaaccggtactatctcatccggtttggttaatgaatcagtaaatagaggatatgatacatacgcaattactaggggaagtaataatttaagaaatatagacggtgcaaattatcttcatgctgatatttggaatgaaaaagatgtttattctgtattagaaaatataaaatttgatgtagttgtagaatgtcttgcttatgatataaaacaattagaaatttcactaagaaatttttcgagcaggtgttcgcaatacgtatttgtgtctactgctggtgtctacaataggattggcaatcagagaattaaagaaagtgatttaaagaactttacagaatggtcttacacaaaaaataaaattgaatgtgaaaaattccttaaagaatattcgatgaaaacggggctaaagtatactattattcgtcctacggtaacgtatggaaattacagaatacccttcccaattgcaactaggactcctggatggaccttttttgatagaatgaaaaaaggacagattatgctagcatctgataatgtaaaattctctgtaatacatatagatgatttctcgaaaatggttgtgtcattatttggaaatgaaaaggcttttaacgaagactttcatataacttcaaatgaaaatgatatacattgggatgatgtaatagagatatcaggtaaaattttaggggttaaacctcaatttattcatgtatcagccaatgtgatacagaaaatatggccagaaatatatgatgaacttgcatataataaaaatttgtcaactatattagatgatagtaagataaaaaaaatatctgatattactgcagaaattgatatatcaagaggaatagaaaatacaattgatgctatgaaaatagaatataataagaatgggctagaacttgatgattggtggaatgatcattgcaatgctgttatatattatgcttatgcaaacgattatttagaaaaaatagagaaagatatagtcagtagctatatagctgaatatggtatagatcaatttaagaatagttttataagagtaaaacgttataacaagatacagttggtcaaaggtaagttaaaaataatattgaagaggattaaatagatgatagatactattgataagctgaagtgcacaggatgtaaaatgtgtgctgatgtatgtgccgtaaatgcaattacatttgatacagatatacagggattttggtatcctaaggtaaattcctcatgtgtaaagtgtggtgcatgtgtgaaaaagtgtattgttgaacgacctttaaaaataactcctaataggattggatatgcagcatatagtaaggatgataaaattcgcaggaattctacttcagggggggtatattatgaattggctcacaagattttatatgaggggggatatttagctggaagtgtatattcagaagatttttattctgcgtatcacattatttcaaatgatccaaaagacttatctaggttaatgggaagcaagtattttcaaagtgatacagaaggtatttatagtaaagttaaacaaattttggatgataataaagaagttttatttacaggtacgccatgtcaggtatgggcattaaaagaatatcttggaataaagtacgaaaatttatatactgtggatttgctttgcagaggagtgccatcaccaaagatgcatatgaaaaaaattcaatcatatgaagaaaaagcaaaaagcagagttagagaatttagagataagagtaagtatgagggatgggcaaattttggtgaatatatgacttttaagaatggcaaaaaaagatttattagtagatgggatgatcatattaatgattgttttattcacaagaatcttaatattagggagtcgtgttataggtgtacgtttaaggacggaaatagtgctgctgatctgtcaataggtgatttttggggaatttctggtcaaacagaaaaggatgatatttatggggtttcatgtgtaattgccaatacaaataagggtaatacattaatggattcattaaaggataaaatttattttgataaggtaaacatagaggatattcaaaaaggaaatccagcatatgttataccagctgttagaccggatgacagagatactttttatgatattgtaaatgtggatggaataaatgctgcagtaaagtattttacagatttaggacttaaatatcaattaaaaagaataaaaacaaaatttgtaagaaaaataaaaaagcataaattttttataaaaaatatatttgatattagaattattcaatttataaagcttaactatttcagtaaaaatattataagagataaagaaacctacatttatcctatgaaaggagcgctacttcaaatcaataaaaatggaataattgaattgcatgctaatttatatttgaattattattcttcatatagaaaaggaaattcgcaaaccattttaagagttgatgaaaatggaaaattagttgttagggataaagttgtattagcatatggaaatactttgtcaatcgcgagtagggcaatcttggagacaggatatttaagaactggagtaaatacaaatataatatgtgcacaagaaatgagatttggccaaagagtcatgttaggaagaaatgtgtgtatatttgattcggattatcatcctatttataatgataaatttgaacgtataaatgataataaagcggttattattggggacaattgttgggtaggagctaactccatggtattaaagggggcagtgcttgacaatggttgtattgtgtctgcaaattcaatggttatggggaacgtagatgaaaataaagtttatataaataagagagaagcaaaatcagttggagagaatgttgtttggaaaatgtagcatttatattcatttaaaaatatcatattatattagagtatagactaaataattgatattatagttaaaattggtttatacctcagaaagggcttgttaaattatgaaatcgcttaaagataaagttgttgtggtaactggaggaacaagaggcatcgggttggccacagctatgaagctggaagaaaaaggagctatagtatatgcatgtgcccgacatgaagtcgaactaccgtgttctattagatatttaaagttggacgttacttgtaaggcggaatgtgaaagtgctgtaaaacagataattaaagatcaaggacggattgatggactggttgcagatgctggaatcacaagagatgccttgattggtaaaatgacagatgaaatgtttgatgaagtattaaacacaaatgttaaaggagtttttaatataataaaggctgtgcatccttatatggaagaacaaaagaaaggagcgatagttgcggttagttcaattgttgcagtttatggtaatataggacaaattaattatgcttcatcaaaagctgctgttattggaatgtgcaaatcatgtgcaaaggaattcgctagaaaaggacagaatattagagtaaatgcaatttgcccaggatatattatgacggatatgttgaaaactgtaccggaagatttattaaaaaaatttgcgaatcaaacaatgctaaaacgtttgggggagccggaagagattgcaaatattatttcttttttgatttctgatgaagcatcatatatcaccggatctgttattgaagcaaatgggggcatgcgtttgtgattcgaaaagtagataaagcaatgaaaattatatttcatcgaggaaagtgaatgtgattataaaaagtagtacatttgtattaatatacgtgtaaaatgataaaacaatggtataattctataagtagcattaagataactgatttttttagaataggagactggtatatgagaaataagctcaacaaaagaggtaagttacaatgtatatgtgtaatatgttgcatggttatagctttctttgttagtgagacaaatgttaatgcagcaattaatttgcaagcgagttctcaggttgtaataaccaagcagccggagtcggtaaatgccgcaaccggaaagcagtttatacttaaagtagaggcagagggaacaaacctgaaatacaagtggcaggcacagaaaaccgaatcaggtgaatggacagatttcagagatacaacccaaagtctgacaagaacaatgagcagtatatatgacggatggaagatacgctgtatagtaacagatggaaatggaaacaatgtgacaagtaacgttgcaacagtaaagctggtttcaggaccgtcaataaccaagcagcctcagtcagtaaatgcagcaaacggaaggctgtttacactgaaggtggaggcagagggaacaggactgaaata

SEQ ID NO: 1564 - DNA, 3398 bp, Unknown
  gut microbiota DNA sequence
tgagggcatttactgcgtctgtgctccctgtgtctgtcctgccggctgctgggtctgtgtgccctgtgtctgccctgctgcattcgggtctgtcggctgcgactgggtgccctgtgtctgacctgctgcatttgggtctgtcgtctgggtctgcgcgccctgtgcctgccctgccgcattcggatcctgtgtctgagtctgcgctgcctgtgccgctgctgccgcagatgcagcaatagatttaaccgagccctcatcattagccgctgctgccgcctgaagctgcgcaacaacctccgctgatgctcctgctgtaccaaccgtcacgatttttggtgatgacttgtacttgctgttgttgaatatctcatcactctgcactgtaccatcgactgtgaccgtcttccaaagccttgcggtcatccccttgtgcgcagactgctcggtgttgaaataaccgaccggctgacctgcatcaaaattaaactgcgtaaccggatcctcctcggaaagtgtctcacttctaaaagaaatttccctgtttgcgggcctcgtctccactccgtacacattgaaggtaatgattcctccactgcaatagccctctatatacaccggattatccagattgtttttaaacttaagatccttgtaggtacctgcaattgccgcatcgtcagatggctttacgtagcttactatcatggaatggttgtagcgctgcactatctcaagctcagcccttataaccgcattgtagagtgtggtagcaacctgacacacacctccgcctaccgagtctactacctgaccgttctcgtatgcgcctgctatctgatagccgttgtcagttgtgatagggctgatagcctcgtaaaccgaaaactgctcacccggatatatgacactgccgtttatcaggctgcatgcattctttacattggctgcacgccctgctgccgagcggctgaaatctgtagaaaagcctcccagattatccttaatctttgagagctcctcctttgagcccctcggctggaccgtatttgtgaccagctctatctcgttcgccgaaccatcccagctattctgcaaaaagtcatttatcgcatagacggattttaccacatccacctctttgccttcctgtcccggaacaaaatcgaagctgtcaccgtttctctgcagtgaattattaactgcctttatattgagctcatcgctcttgtcataaatcatctttgcggtcttttgtttatcaaccgacagatacatgttgacggcaacattgccctttttgagctcctccgactccacaaatctatcaatcaggctgccctcatggcatactgacatagcctcatccaccgctgcatcagtgtccgctgaaacagacatatcatgtgcggttgcatcaaatgaactattggcgccctttaatgaaaaggatgtatcctttatgctgtcaacataggcatcaactgctttttttgcctcttcctttgtcataccgcctacatccacactgccaatgcacactccatctgtaattgtctgtacctttgccttctttgtgcctgacgaaccgcttgcatacgcacttaccatgcctgatgctgccacaagcacaaatgccattgtacccagtaataatgcttttttattaatcttcatttccgcttccttttcctgaggctgttaaaagcgcccctgtcatcgcttaactgaactgcattttatatcatattatcatattttttccatatttcaagaaaagctatacaagacttgacacaaatgttgtcacaagcatcgctgctataaccactattatcactatagcaaccaccttctgatttctttttttattaaaatcgtacatactattcacctctgttcaaaaatgagttatactattttcatatatgagaaaggattttccaacatatgattccaatttgtctaattttattcattttatttatagcagtcattacttttgccataaagagggctgattctgcccaggcaaaagtcaccgaggagttctgggagaaggagcgcaaagccaactcaaccctccgcggagataccactgacctgtgttatattaccataccggaaaggttttttccattaaataatgataaaataaatgatttaaaggataaaacccttatcaatctcaccggaatgacaaacactgatttaaagcttaaatatggcattctcaattttaaaaagctgtctgaatatgatgataatttcacgaaatttgtttcaatgctgccggactattacaacaggcttactgaggcaggctatgaatcgctggccaatgaactgcttgaatttgcggtggagcagggtgctgattcaaagagcgtatacagcctgttagccaatacattcgtcagcatgtcaaaagctgaccggcttgcagagcttatcgagaaagcaaaacagctcaattctctttcaagggatggaatcgtttctatgcttgagagcctacaggctgatgccgcctcggccggtaattaatttgcgttatagcttattgtattataatttattgtattgaaacttattccgagccatccacacacctattaatatatctgctacgatattcatcgtacagccttgaggcctgacttctggtcaggttgtcccacgatatgacatctgctatcccatactcagccatcagctcctttagctgtctgacctgatgggccgtggcgggtgtctgtttttttgccttgtatacaagcggctttgactccaccgtatctcccttttcatccatcagtgcaagcagcttttcaaatatctgctttgtctctatcgcatcgtcgagtgccctgtgcgcattttccctgctcacaccaaaatactcacacaaatcctccagcttctttgactgctcagccggcagacattttctggccattttcagagtatcatatgcattcagcgagagtgtgcgcttgtgatttaccgcccactgctttaaaaagctgtaatcaaaggtcacattctgcccgagtatgatgtcatcccctataaaatccagcaacttatccacagcctcgtccatatctgccgcattttccacatcagagtcggtgattccggttaattcctgcacgcgctgtggaatatgctgctttggatttaccagtgtggatatcgtatccactatcctgccgccacgcacacgtgccgcacctatctctattatcttgtcatttttggcagaaagacctgtcatttccagatcaatcaccgtataattttttatatcatctaagttgctcatattttagtccgtaaacctttccggcttttaccactatagtcatatcgttttactgctattctacatactccac

SEQ ID NO: 1565 - DNA, 4401 bp, Unknown
  gut microbiota DNA sequence
atagcctgatgatcaagcgggtctctcatgtcatagtggaaaagcgcccacaccggctccttatgatactttggcaactcctcaagcttgcgcgtgtgcttgtcaggaaaaatatagtggaacggctccacatgtgacagctttccattcttacagtatgcatgtgtcatgtgcttgaatttgcctatatctgtggcccaccccgggcggctcttgcagttctcacgatagtacaaatcaaagatgagtgactcctgaatcatgctgtaaatctgcgcattctcatcaaaatcggtattatctctatctatggcatgttcgtcaaaatcagtattatctctatctccggcattttcggataatcccacagaagtcatagcatcgctgtcacggccatgcagatataaagccagaaattcaagcagtatctcgcaccttctgatgcgcgaatggctcattccaaaatagccgtttgcctcataaaaatctccaagctcctgaaaaaactcaaacgcactgtcaaagatacactccatgagcttcattgtaatctcaaactgtccgctgttgtaatacacctcaagcatctcctcgacgcgcttaatttttatcacatcatcaaacgaaagccacttcgtggacatgacctcatacggaggcctgtcatggtacacaataccatattccgcggcatgctcaaacatgtatgagcccttgagcacctttaaaaatccaagctgcagctgatttggcttaagctcataaatctcatcaaaggaacgcccaaagctgtcataatcctcatacggcagtcctgctatcagatccagatgctcatggatattgttgccactttgaatgagccgcacaacctccttaagcctctcaagcttcatagtcctgtgaatctccttaattgtgacctcattggtggactgcacaccgatttcaagctgtataagccccggcctcatatcagaaatcagttcaagctcctcctgattcagcagatccgccgatatctcaaagtgaaagtttgtcacaccattgtcattcgcctttataaagcgccacagctccatggcatgagcatgattgcagttgaaggtcctgtccacaaacttaatctgcggcaccttctggtctatgaaaaacttaagctcccttttgacaatctcagtatccctgaaacgcagtgtcttatccaccgatgacagacaatagctgcacgaaaacggacatcccctgctgctctcgtagtagatgatacggtttgaaaaatcgtcaagcgtatcatagcagaatgggatttcactcatgtttttgattgggcgtggacttgtgaatactatttcatccgctttgcagcccgcgttgttcacacttgttctattacttgtactattacctgtgctgttttttctgaaagcaatgcctgcaatatcactcagctttcttttatgcgcataataaccgcacagctctctaaaggtatcctcaccctcgcctatcatcacaccgtctatgtatggattttcccgcaaaaatgcctccacctcgtaagacacctcagggcctccaacccatatcggcactgacggacaaagctttttatactcgcgtgcaatatcagtcacataatcaatattccatatatagcatgaaaaacaaagtacatcgggctttctcttgtaaagctcctcaagaatgtaatccttctgattgtttatcgtgtattccgcaagctccacagcatccctgtactccccggcacaggcgcgcagtgagtaaactgcgaggtttgaatgtatgtattttgcatttattgctgtcagtaaaatgttcatggtttctccttaaaaaatgacccttgaatgtagactttatgccacactcaaaggtctgcttcgtattattgcagcattgacatattaacaagcctgtcgtacatgccgcttgcaaacagcaccatcatgccaatcgtgcagatgaccgacagcacaaagcctattatcgatgtaatcataccggcagttgctattgcattgttatactgctttgccctttttgacattttggaagcaagcatgccgacaattccaagccccatcagatatccaaaaaacgagaaaataatactgcaaatgccaagcaccagtgaaacaactgccagcttagcgccctcgctctcgtcatctatgacagtcacattattgtagagcatctcaagacggatacgccttgacttacgcagcataacaagcataggaataccgagcacgataaacgcgatgcagttcattgccgaaaactcattaatcctatcggccactccgcctccctcaaatatgcccgatgataaaagtcctcccatatctacaacagtatggaaaatggcaagcatccagaaattgcgtgtagacgcgtatatcatgcaaaacagcacacccatgagacctgctgaaataacctgtatcagacaactgctgaacttaacccctgcacccatattggaaaaatgcatcaatccaaacagtacgcctcccaaaactacggctcctgtgattccacctttcgtctttgggaaagctctcagtaacagattaaacactactcctctgaacaccagctcctcaacgagacctaccaggcagaccgcgataaagaaaaagatgatgttgtaaaatgccttcacgtcaccatgctcactcaaaaagcacaaataaatgcctgaaacaacagcatacaaacaatacactatgaaaaaaccgcctgtataaaagcttcttacccatcctgctgcattttccttaaagatatcccacagcccaaatatatatgtgatgccaagaaaaataaccagaacaactgtctccacaatagcctgcagcagataatcatccgccttttccatgcccggaatcagtcccaggacttttccgctccactgcaagggtgcaatgaaaataaaaactgcaagaatggcaaatattatatttgccggtgccgaaaggtttctcaatttctgtttcatagctataaatctcctcatttgtgtttaatttgatataaaaatattctatagcatttactttgacattacaagctccggataatcaaaattcctatctattattttacttgaattgagcactccgtcaatgtctaaaaaaaatcagccatttactgtctttccgtaatggttaatgacactccgatttctgccacaggcgaggaaattgaggatataaaatggacattcagaaggacaagaaaaccaaagaaaatataaaaggaaaaagaaagagagggctcatcgtccctctctttctcgcctatcagtatgtcatctaccgatgtgtgcaacaacctgctcaaggcatacagattgtcgaccgtcggaaggctctcaccgttctcccatttcgacaccgcctgtcttgtcacattacatgcctcagcaatgtcatcctgtgtaagctgattcttttttctgtaaaacttaatattgtcacctatcaaaataaatacctccaattcaatttatacccaaaattataccgacaggtggctgaaagtaaagaaaacattggttgcaaatgcgcaactttgggagggttgctattcaatcttgctttttatgtctataaagcatatatcttttctgtcccaagatgctcaaatggtctaaacagttctcttaaggaatctgacttcgaccaatcaatcttagaaacaaatgttccaaatgagcgcattgcatttttaggatttacctgattgagaagaaatttccatttccattcccatacacgccttctgctttgattccgtctgtgtcttttctttcacctcttccgcagcgtacactccctgttgtgttttctttgaaaaaaagacggacatacatgcccgccttctccatggttattttctcgtttcattttttaactatcgtttctatgaattcaaattttctctgcgtttctttacagtaataatcaatcccgttccggaaagaattaatagtataaacagccatacactcggtgtgttgtccccggttttaggtgcagtcacatccttcttatcagttccactcgatggcttgtcatcagaggaatcgctattgttattgtcattctggttgttattactgttatcagaggtatttgctttgatggtaaatgtggtgcttgcagaaccatccgtccaaaggatttcaactgtattggttcctgccgaaagtgtattcaggtaggaagctttcagtgtgataatggtagagccttcctttgcagtgtagttgctcctgtctatcaaatttccgtccaccttaactccggtaaacttggagaagtctccgttaccccggatggtgatattaccatcactgtcatg

SEQ ID NO: 1566 - DNA, 1481 bp, Unknown
  gut microbiota DNA sequence
acatatggcggcagacctgtctttaagtcaattgagcaggtgatagcatacaaacatgacaccattgtcggaaggttttcatgcaagggatttgatacgttcggaccgttcaagctgattggcggtgtatcaaaggggcatccggatgagaaggatattgcggcggcagtggatttttacaacggactagcagaacagccagtgtttctgaaataggaaaactttgaaataggaggattgaatgtgtgaagaatgaaatcaatgaatctgtatatgatatcaatatggataagttatgtcagaattcaattgaattaattaaatatgcgcgaaacattactgcaaagcaggtaaataatgtccagataatgacctattattctcttggcaggtggattgtagaagtacagcagcagggaaaacacagggctgaatacggtaaaaaaatcataataaatctttctaaaaaattaacagaagaatttggcaaaggcttttcagaatctacgctggaaaaggcaagaaagttttatttaacatataagggtcgaatttcggaaacactgtttacggaatttgcaatcaagaaatcggaaacggtgtttacgatttttgaagaggagcatccgtttgtggtaacatggtctcattatctacaattgatgagaatagaaaatgaggatgaacgctcattttatgagatagaagctgccagagagaagtggggagtcagagatttgtcacgtcagtataattcttctctttatgagagacttgcgttaagcatggataaggacaaagtgcaacgcttatcacaggaaggaaatgtgattacaacctcaaaggatgtgctgaaggatccatatgttttggaatttgtaggtcttgaagataaatataattattcagaaactgatttagaaaacaggctgttagataatttgcagcagtttcttttggaattgggaaaaggatttacttttgtggcaagacagaaaagattttcattcgaagaagatcatttcagagtggatcttgttttttataacagactgttgaaatgctttgtattatttgatttaaaaattggcaaattaaagcaccaggatctggggcaaatgcagatgtatgtcaattactatgatagatacgaaaaaacagaggaagaaaatcctaccattggtgtattgttgtgcaatgaaaaaaatgatgcaatggttgaactgacattgccggaagattctaatatttatgcatcacagtataaactgtatctgccggataagaaactattacaggataaattgaaagaatggttacaggaagaaggtggtgctgaagatgaaatttaattttaaaatacaacagtaccagacagatgaaagatatgtcacagattgagttgaaattcgattcagaacagaatgcatttggtttaacagaggatttcgatgatttgtatatccccaaaaaagccagcc

SEQ ID NO: 1567 - DNA, 317 bp, Unknown
  gut microbiota DNA sequence
tgcatgctgcccccgtcgcaattagtactgctcctccaaccgtcctccagattccctgtgtctttctcttttcggcttcatcctttattttctgttctgtctcatagatttcatcgtatgcttctttattcttctcatgcaggtctccaaatattttgatgcttttgtccagggcacctgcatctttacctgtgataaaactgcctgtttcatagctctcaatcgcacactggctaaggcctatttttgaaagacatgactgcagattttccagaagcagctctactgaattttcaagccgtaccacattttccctc

SEQ ID NO: 1568 - DNA, 7463 bp, Unknown
  gut microbiota DNA sequence
gaacggcttatatcactgagtcattctatctacaacagtagaaattattctatattacttaactccaaatttgtgtatttgcacaattttttagagccaagcaactttatttttattattttatataacatttgcacaatatatgttaagtaatatagattattataaaattaaggtccaggtttgcattacgttatgatgaaaaaatcattttcttcatttttggcataaccatatcttagaacttcacagcttgatgacattttgaaaatatatacactatctgattgtgaaaatcgtttttcaaatgtgttcgtcaaatcgttaactatattatcaacaattcttttactgttgtcaatctcaaatactgaatattgaattcgatgtccaaatcctgacagatacttagcaaaactggttcgtaatttgtcatttgaaattagtatattttttcgtgttgaatatgtcccattgtctattttttcatgtgccttggttccatcaagctgagcttttgactgatacataattgtgtcctcgcttccatataatttatggaaatatatggaagccggacaaaaaatgaaatcatttaaatttgaaataactatcaaatcatccattataaataccttttattttgaataaagtcaaaccagtccttattggaaattttaagtttatctcttgaaaacttaccgtcttctttccaattctctgtaatttgtttgatttcatacaagccttttagagctatacaatatgcaccattagcatctgcgtctttaggtaacgcatctcctgctttagctgaatcataaaatatattattttcattgagcaccggagatatcaaacggtcataatccctatcttctaattcacttaaactgtttctcatttgtacagtcaatctaaaaatctcaaatatgtgttgtacgatttcataatcaataatatcctgcctcagatcatgaccatctctccaatttatatctgtcatttctagggttttttccatatcttttgttatatcaattgtatccgattcatttgagaacctgccattgacaaatcttctttttatcctaactccgtacgtatatacactccagcttgactttgacataacagtattttgcgtaataaagttattataatcaaatgtaaaacaaaacagatttttttctgaatcatatctgatactgtcaaatttttttataaattctctcttcgcatcaactgttaaatctttaaatttaaatatatttacaaatccggttgtaggatctatttttgatgtataggcagcaggtacgtaaaatatacagccacactgatgaccgacatttttaagtttttcaggaatatatgtaagctgatatccctttagaagcccaccgttttcagttatggatatatctttaaataccagatagttaagtttgttgataagcattgtctcaaacttctggtaaacctgtcgctcaaccttgaaacgaccttttttaaatccgtagcttaaatcctccattgcaattatggcattatatttaataaccatctttgaaatttcatgaattacaagagataaatagccttctttaatttcttttattttgccgatttctttccattcttttcgtgcgatttgtcgcgccccctcctgctgcttgagcttaatctgataatcatatccattaacaatgttaaacgatttttgttcaacaatatttccacaagtatcaattactgaaacatatatcaggtttctttcaccacgatcaatgcctattacatgcaaatccttttctttagcaatatattgtaatattctgtcattaataaagcttgtcttattggctttaaaattgattgtaataggcatatgaagaaaatatttatcatatgtatatctataatcttttactatgtttgtagcagcctcatgatgacctactacattcttaagcttagctgcttcatccgaaagttctttatcacttttatcattgaaatatttataaagctcctgatatatattttccggtatggtttttctgactatctggatatttccaaattgatctttttcctctgcttcatatgttctattaacaagaatagagccttttttatgaattataggattctttatgcttgattttctaaagaagatttccgcctcaccgtttaatttcagtacaatatcctttaaattctcttcactaaacaaattcttcaaatacatagtatgaagattatcatttccggtacttttcttggaaaaatctttgttatatatttggaataaatataactgtcctttttcctgcaacaaatcaatatccttttcgctgatatatgtccagtcgattttataaccttgcaattcgacttctctgtaaaatccgctgatatcttcatatgtggaggtgtcagaaaaatcaaagccaaaattcttccattcaggatgtattgctatacagttcttaaaataatcaatcaaatcccgacaaaacgttatatcaaaatccttagaggatttaagatgcttgttttgtttatagccctccaatatataggcagacggcttatatgtttccactccggtttttgaagagaggaataccttaggaatcattttatttggtcctggcagaagattataaatcatcttcttataatcccctttattttctgatgtattaccttcaattatctttttgtcaggcttattttttgcattaaatattcctaaatagtacaaattatcacgcatgagaataattgcattattactatattctttacttttactccatccatccgctagtgtaggaataccaaaattcaatttaattttttttgtactatatggcttctgcgttacataattacgcacaagattatacaatgaaattaccggatatatttcgtcatatatctcttctaactccgcataaaaattattatctttatctaccagctcctctgtcatgaaaaccgaacaccaatgaaaagcattcattattacatcgagaacattttttaattcagatgctttcaattcactttccaccagatgaatttcaggattatacttaagctcctgtgcttcaaaattattcaaaatatgtgatatttcatgtatatatgtctctgctttaatattatcatccggacataatttataattgctaacaagctcattgatttcagtaatgcttttttgcagatcattctttaccgctttttttaccttgtcagctttagatttaccatttccgggtaatatattattgtaatgaatttctaatgcagtatttattgtttcccaatctctatatgtcttttgtgaaactaattcatagaatttactaacaatataaatcttatcaagattgtagccgttatagttgtctccaatcttacgcaatctttcaacgatatgtttcgaactaatattgtccaaaaatccattcactgattgataaacctcttcatctgattcaaatttatacggcacctcataagaagtatctgctatgcacagtatctgtttatgaagctttcgcagcttatagagatttttgttttctttatttttctggcaatataaattcataaatgaatttactttaccgcatatatcattataaaaagatataccttcctgtgtaataaattccccatatttttcataagaataaattttctccagagacatttcctttaatgaatccttcatatctccggatattttatttatatcatcatttgaaagattttttacaattctcctatacaccaatgcattactaaaaaatatctctgcattatcattaactattctatgacaagaagatgaagatatatcatcagccgaaaaacaattagccctgtttttaaaatagtccttgaatgatgttgcaaatctggaaaataatttaattacctgtgttttttcttccttttctgatgcagaataattattgttatgaataacaaattcaggaagaatatctgagattaattttgcactgaacatatttttaaatctatcatcatctgcaaattttttatagattgccttacgtttttcagcctgttcttttataagagtgtctttattatctccattttttaactgaatttccattttctcaaataaagaagtccagtcaatatcatcaattgacgataaagtttctgaaatgaaacctctgtaataatcatccatgatatctttaagtatctgacgattttctcctcttagctcatcttctttaattattccgtttttaacaataaattgctgtgttgtttcggttggaatgagagcattcctaagagtcttctgcaaagaagaaattccgataaaattctgaaagttatttgttccgttattcatatttctctccttttttataaagatatgtaatgtgtaactagcgtccttgtaaaaaaataacgttttttaacgttacttctttaatacctgatatctttaatctaccaactgaaataagtagaaattacttgtaattcaaatatactattttcctatggcgatgtcaaatattttgcttaaagaagtaacaataggtcttttttttgcttatttcttatgatggctctagcttatcacattacgagtcccaaagtctgccctcgcaacacgaatttttgttcgaagttactgttcagtccctagccagaagtcctctctcgtaaccatattttatttataaaaacatctataatccttaaacaaaaaatcgctcaacctcacggtctgagcgatttttctattcgggaattggtttagttccccatctttatataagctctactcaagcttgaatttgccgacttccgttgccagatcctctgcgatgccattgttgtcggaagcctcgctttggatatcattgacgttaccggtaagctgtacggaagactcggaaactcccgcaatgcccttggcactctcttccacggcaatgttgaccgcagagatggattcacggatgccatccatcgtgctgcgaagttcttccgcagtctgcgcgaactgctccatcattgcacgcattgcattcgcatcggtcgcataattttcgctcgttgcaacaagacctccgaagccttcctctgtggaattgcagacaaattcaatcatctgctgcgatccctctgccagttcatccactgcctgaatgacctctgcactcacctggcggatttttgctgcggcatccgcagaattacctgccagctttccgatctcatccgcaaccaccgcaaagccgcgtcctgcttcccctgcgcgtgccgcttcaatacttgcattcagcgcaagaagattggtctgttccgtaatctcgataatgttggaagtcagaatctcgatctgttccaccgatttggactttgcaatcttctcatttaaagaagccgccatcttctcggtctcaatgtttgctttcttctgcccctccgctgctgcatcattcgccccggaagcacggctctccatctcctgagaagagacttttccggcatccgcattgcctgcaatacgctctaccgatgaatagatttcgtcaattgcctccgtgatctgattgagtgaagaagtcgtttcctccatcgccgcactcatctcctgcatcgttgccgacacatcggtaatgctttcatccgcagagctcagatgatccaccattttgcgggaagaagacataagccgcatggatccggacgaaattccgatcataatcttgcggatatacgctaacaactcattcacattgcccgcaatcagttccagctcatccccgcttctgacatccagtttctgtgtcaggtcaccctcattatgtaccagatcataaatcttcgcatttacctgcatcagtccctttgtaatcctgctaacgataatcgtcagaatcaggattgccagaatcagacagatgcctccgatctgtaacgtctggacaactgccttctgtaattctgctgcaatcgatgacgcatcataatcgcatccaagtattgcaacaaccttgcctgcattgtcctcaataggcttgtataccgtaatcagatctccgtcttctgtatggtcgatgtaatcctgaatgtattcctttccaccgaacaccggctccagttccgcgtatgaatccgcaaattcatcaccgacttttgccgcatcctcgtccgaatccacaccataatacactttctttccgtccgtatacaatgtgtataaaaaggcgattccgcatgctttttgcttttttctaagatctccttgcagattctgatagacctgcgtaccttccgatcctaccgtcactttgtataccagcttggcatccagcgaatccgcaacgatcgttgccgccatgtctgcttcctcaacgcccatcctcaccatgcttttctcaaaacgcgcgtaggaattgtatcccatcaaaccacagacgagtacaacgattatgattgacggaatcaggatcttcgcgcggattgtgagtctccttgtacgaattttgcctttgttcatttcaacacttctccttatgtctacattgtatggcacaagtataacacattatctaacgatgggcaacgggcatgttcgtcaattattatcgaataggaatcgtgacggaatcctttgcctttttccatacgatcactgaatggtaactgttcgaagctttgttttttcacagatttgtagtataatacctaccatgaaattacaaaaattatacagcaaggttcgtcaggcccttgacgactacaatatgataactgaaaatgacaaaatcgccatcggtgtctcaggcggaaaggattctcttacgctgctctatgcgctttccggcatcagaagcttttatcctgtgccctttgagcttgtagcgatagcggttgacctgggatatgaggattttgatttgtctccggtgaaggcgctgtgtgatgagctctctgttgagttttatgtggtgaaaactgatattggaagaatatctcttgagaaatctaagaatcaggctagtccctgctcatggtgtgcaaagcttagaaagggagctttgaatgattttgcgctgtctgtcggctgcaacaaaatcgcatatgcacaccatatggatgatattatagagactatgtttctttccctgctatatgagggacaattttattctttcgcgcctgttacacagctggacggcagtgggcttgccatcatccgtccgcttatgtatgtcggcgagtctgatgtgaagggctttaagaataaatacaatctaccggtgtgcaagaatccatgcccttacgacggccacactagacgcgaatatgtaaagcagcttgtcagacagctcaatctggaaaatccgggtgtcaagaagaggctgttttctgctatt

SEQ ID NO: 1569 - DNA, 643 bp, Unknown
  gut microbiota DNA sequence
ctttttaattatttgatttccaatttttatcctaatctctcgtatccgcataatccagatcaaacccaatccacaccttagttccttttccaagctctgactccatgcggattgtatgccccagcttatctgccatctgcctgcacagataaagccctattcccgtagccttcttatcggcatgaccattgtagcctgtgtagcccttttcaaaaacacgtggcagatcctcggctttgattcctattccggtatcctttattgtaataaaaaaccgatctttttcctctgcagtttctattgtaacaaacccctgcggtgtatattttatggcatttgaaagtatctgttccagtataaatgcaagccatttttcatcggtatatacctgtttttttgtacctgaataatttatcccaatatgccttcggatcataatctttgcatattttttaatggtatcacgtatgacaccatccaggctgactttttcaagcacaaaatcattttctgtgctgctcacacgctgatactgcagagccatgctgacatattcctctatgcggaacaattcatcctcaaatgaagccacattatctgatagttctttaaatgcagcctgctgtttcgcggcatcatttaa

SEQ ID NO: 1570 - DNA, 4511 bp, Unknown
  gut microbiota DNA sequence
ataatccttcttatatttgggtgaacttaatggaatgacatacttatatccatttttctgtactatcacacccaaaaacttacgttgttcttttccatctgcatttgacataatcttcgtgggttcaaattttcgtaaatattttacatattcaacggttacttcgtatagttccattcattcctccataatagtaaaataggacaaagacttaatctttgtcctatttgccatacttaacggtgatgacaaccaaatattttcatctcacacttaacggtagtgactctccgaatattttcatctcacacttaacggtagtgactctccgaatacaaggaacatctccttgtacttgtattatatgcagttttcaaaaaaaaatcaacatatttctgcggaaggttcaaaaaccgtctttgagatttagcaccagtatttttttgattccaaaccttgcatatagtctttccaaccagcatcaatgcttttttgaattatatatgagttctcacattttattgtttgttttgccattttacacgctatcattatctgataagaagttctatcatcaatgcacccttgaaaagtaatccatcaatattcctttgatatgattatatcttctcgcatatgagttttccacccggataatttccatgttgtgtgccttgcatatcgcatttttctttctgtcccgctctttcaccaccgcatcctcaaagtgctcttttccatccaattctatggcaagtattggcaattcgcttctgccttgtttttcgtatacaacaaaatcaaaacgtcccatgtaaaacaagtcatcataggttatgttatctctgaatacctgtgatatggcaacctccttgtgtattacatatttactctgcgaaagccatatattttcaagagcatgagtaagattttcgagaaaagcattttctgtagctgtcgagaacggctgtattcccagtgctcgtgagcttatatgcttttcagtaatttttgaatggccatttgtctttatatactgcgccagctcgtacaaatcatcatcagcttgtcccgcatgcagtctttccagctcttttccgtttgcgaaaagcaccagcttctcctttgctctggatgtcgcaacatttatgagctccttattatttttaagccagttatatgtacctgagcttgtcctttcagaaattgctgtagaaaacagtactacatccttctcatcgccctgaaatgcatgaaccgttccacagacaagattgctcagtttattctgctttattgcattttcaatcaattgcttttgattgacaaacggtgtaatcacggcaatgcttttatctttatttaaaagcgcatattccaccacttcctcaacctcagccggagaagtattttttatctgtgtgttatcgcttttcacatccatatagacaagcggttcaggctcattactctttgactgtatcttgagctttgagttatagtattttttattgttaaaacctattatttctttattgcatctgtagtgatttctcagaagcacctcatcacttactgcatcacaggcaagatacgttttatagattgaattttccctataatcgtactcatctgatacatgatacctgcgacgaagctttttatttgtcagttctccaagcagaataaccggatttagctgttgcggatctcccactagcatcagtttttctcctctgattataggcacaagtgagattgccacattacactgacttgcctcatccataattgtcatatcaaataaaggctcaggctcacctattttgtgtgcagaaatgcatgtcgttatgattataggaaaaactcgctgaagttttcttacattttcagatttacacatatatttgttaaactcattcaccagcttctctggtgtctcatcagaatccagtatctgtctaagctcctggaatttaggttcctcgagcgcctttatatagcgcgcagacgtgtaaaacagatactgataaaattcatcctcatttctatccaaaagctgcatagcatcagcatccgatatctcaccgatagcagctatccttttatcaagcttctgcatctgatagccttgcagatctgtctgaaacggcaatagcttcatagtatttttcatatgctcctgatatttcatcagatgtgtaagtgtctcttttctctcctttaaatccagaatttcctcatattcctttagacgcgcagacaaacgttttgccctgtctatacgatcatccttccgcttatcaagtgtagaggcaaaaatctgcaatgactgcacctgtgtacgcagctcattaatatatttaattgcctccattactttttctgtattccccaggcgaagcaccggaaatgggattgtcttcccgcgatacttcatggatgagagcttttcaaaaacattatctatcggaacattattatatgatgcaaacagcactgtgacattgttaaaaaaagctgttactatcgtgtttattatagtatttgttttgccagtgccgggtggtccctgaatatatgcaagaggatatttcatagcattgtttatcgcaagcaactgatccagatttatatttttattaatcagagcaatcggatatgcttttgtcctccttggtctctcaagaagctctccaaaaaaagcctttattggatatgtcacattatcagcctcaaacatatccataattgccttatactcttcgtgcagattgagaaccacgtccatgccaagtccaataacatacggcatatcatctactatggatttgttgccaccatgctctgttattgcatcctttattttttccagatttttctcaaaatcctccaaaagctcatattcatcagcatctaaaaatttccttgcattttcttgttttccatctatagaaaactgcgtacacaccgtaatctcctcatccggtttaaaaatatgattttttacatcaagatttagatttctatatgcaagaacatagagtcctttattagtgtttatactcaggacatttattgccagcctcttaacttttaatgatccgctttttcttttttcccgcgatgaaaaatactgaaattgcgcaaccacttccctgaactgctggtctgtaagctgatacataccacagttaatcctatctctgtcaatgtaatgaatcaaatcgtaatctgtgatatacggagtcgtatcaagcttattacatatctcaagataatttagtatttttaaatttgctgagctgtcaaatatatttttgtaacgctctggatgcatctcaatatcttcaacaagtatcttgttttcagggcagtatgtcccctctattatctcagtagacaatattgaatcgataaatatcctgtcatattctccaatcgtaagctgtcccagatgaagtccatcaaccttcatagttcggcttctcggatcaatgtctcttatccctatccaatatttcgtcacctgatctgccttgtttcgatattctattttcagccatttaccctcatgtatggctctgaaaatatccctgcaaatttggttcatactgcctcccacagctcattccatccggcatagcccatcgatacaaagtatctaaaccatatgcgccatgcatcataaaacaagctgtctttgttctcctcagccaatgttaccaggtcagcacaccttactacatagtccttatcctttgtgaaacgacctgttgatatgccatttttgtatagctcatacagattttcaagggcagcctttgctattgccatgtcaaaattatcgactttgctttcgttgatttcattgaatttaaggcactccctatagtttttttctataacgttatctgatacttttttttccatgttatcacattcatacctttaacaccatctcatgccactcttctccgccccaggtagagtcggcaatccccagatcctgcaatccaaactttttatacatctccaccttctgctctaagcatgtcagaaacagcttttttcgtccgtttgccttttcacgctggctgtagcggtacacgagctctctggcaaggccctgtccacggtactccggcagcacgtcaaggcccagaagcatcacatttttaccgttttcatcgcataaatcgatgtccgtgaagaactcatccctgaacttttcctcgtctgttgccacaccatttaaaaagcctgccagcttacctgttgatttatcaactgccacgagaaatagctgtggtacctttgcaattctctctgtcattgcctttggagagcatgcttcattcggtgggaaacatatctgctcaattgctattgcctgttctacctcgtctgggtttatacttctaaattcaaaattgtctgtcattattttatacctcattcttctgtttaccatatgttaagattttttgtataagtatataaccaaaatc

SEQ ID NO: 1571 - DNA, 637 bp, Unknown
  gut microbiota DNA sequence
tatcatacacatacatacaatttaaatagcttacacctttttcactccaatccatgtatgctttttttatttcttcttccataacttttattcatttcctccaatttgtccaatgacccattccacaacctgcttttcattataatacatagtattataagcattttgaatgtacgttcctgccgcctgatacaaaaatgtcattttctgcatattactggccagggatttaaaaaatgcaagcatctcctctctggcctccccctgatatgtatcctctgattctatattttgtacacactgttcactataggtatatgcctccaaaatctttgcctggatatttcccaattcacttatataatccaaaacaccggcacctatttttatttcttctgaggatccgctgcaggccgtatctacgctactacgcataattttttacctcctcatcaattgccagaagtctcagtaattctcttcttacctgtactgcacccacttctctttttatctgccgattcaggtcatactcaaatatctgattattcttccaataataaagccattcttttgttaatgcattatcctgaaattctcctatcatgatattctctttgcagtcttttacttctct

SEQ ID NO: 1572 - DNA, 203 bp, Unknown
  gut microbiota DNA sequence
taagtccttcttttaaccccatttccgagaactttgttgctgcaatggctcctccaagtgtaaccaaatccaccactgcaaaaaccactttaagtccacgttccatgtctgtcaagtcttctccggttatcaaatcttctccggtacatgcctctatgataggtttgataattgtgatatccaacacggatgaaacaaagttt

SEQ ID NO: 1573 - DNA, 782 bp, Unknown
  gut microbiota DNA sequence
ggtgatagagtcaattcgttttataatacaataaaaatgagaggaaacccgaatgatgaaacaatttttgaggaaaaccatgaaaaatatagcgacctacgtggaactggtattgtctgcatttctcgtatttgtgatagcgatacttattataaagcttgtagggcaatgtttttttgatatatggcatgacaagcttgagttggagtattacatggaatatgccatgtcgcttgctataggcgtggagtttgtaaagatgctctgtacgcatcagccgggcacgataatagaggttctgctttttgcaacagccagacagatgatagtcgagcacctcaatgtatatgagactcttgttggaattggcgcgatagcagcgctgtttgcaatcagaaaattcctgttctgcagttttgatgaggcagatcacatgatatgccggggcagccagacagtggcacacgcgaatcttataactggagccaaaattccggaggaaaagacaagaattcttcgcaatgtcataagcgacaagctgagtgaagagggaaagacggttgcaataggtgcctgtgtgtattataaggattgtgcacttagagtggatagtatgcgcgaaggggtggtaaccagagttgaagtgataaagaacctgtaatgtatatttaacctatattataatttttttgatttctgtgctgccattaccatttgtattttatttctcgcgtaagctgttgttatgggggtaagcgggctaacttgaaaaagtaaattcc

SEQ ID NO: 1574 - DNA, 788 bp, Unknown
  gut microbiota DNA sequence
ccaaatagagctatcgtgcatttttctccatccgataactgatctatctttaaagacttgccgtttttattgaccttcattgccaaaggtcttctctctatccgaatgtcctcaaatccctcaagcatagctaacattgcttttttaacagctgcaaggcttttatcttcatatttcgaatcatctctaacctttatctgattctctatatcttcctgatttctaaaccatttaaataaatttctaaaatctatcgtactttctatagctttgtcgaatgcatccaattttacaaactgctctttaggtgccctgaccggcacatcaagcacaattctatttactccataattaacaaaaataggcatactcttattatccgattcctctatccaattgccattgccatcatcataacccatttgtatatataacgattgaaacttatctgtaagttttttaagagcacttgtatttcttttttcacctttagccctgtcaattgtacgctcataatatatgctttcgccatccccaaaatcgaaatctgcctttataccggccgcagactttccatagctaataaaatcttcattgaatctggctgtcttacttcttaccgttcccatcagcttcgcaatgatatcagcatataataaatctatagcctgaaggattgttgacttgccaactccattcacaccaaaaataaccgttgtcttattatcaagctttatttccagattgtctattcccttaaaattttgtaatgttatcgaatcaagctt

SEQ ID NO: 1575 - DNA, 633 bp, Unknown
  gut microbiota DNA sequence
ttatatatatttcaactgtcaaatatacttttaataataattaactcactttatatacaccacttacaactttttcataaaaaagaaatcgtacatggctttctgatgtataatgaatttgcacaaaaacagtacaaaggaaagtgaccctgtacgacaaagacattatacaacgaaaactcattaattggtagacttcataaatattttttgaatattatgcaactttttctgttcctacggcagaaacattatttttactagtactttaaatactcgcattggagtcagctcattcaatcagattcctgtaccagcattttcttgccgtgataacagaaaaatccctgaatactttttatcatgcctgctcttatgccaaagctgattattcaagatttatgaatgtaactgccaaaatggcactgcaccttattccggaacagcttaaatcacagccggtgtttctttgcattgatgatacaataatctccaaatttggtacaaaatttgaaaatgtatcaaagctgtttgatcatgcaacacataatggctgtaattatcttaatggacactgttttgtaagtctgatgttatgtgtgcccgtgtggaatcgtgataaaatatcatatc

SEQ ID NO: 1576 - DNA, 569 bp, Unknown
  gut microbiota DNA sequence
aattttttgctaatttatggttgacttttcatagctggtctcctacttatataaataatttattccacctaaatcattagtttgtgctctcgaggtactacttgaattataagcaatatctgccctcatcaaaacattactaaagtctgaatgtgccaaccccataacatgccccatttcatgagctataacagccaatcttttattttcacttaaatccgaaaaatccgcatctaattgtatttttccccaagcccaattgctactgaatggatcaacctctgtacttccattatacatagttgttaacccccaccattcattaacagtacttacttgatatatatccattctactacttgattgtgttgtggtttttgtataagaaataggggttgttactcccatgctactagttgtatttacccattcgctcattgccgtattaatataagatgcatagccgcttgcacttgatgtaataaagtaatgttgtgtatcttttccataatttcccacaccatatgtcaatttgtgctgattatatgtattatacgcatacacagtta

SEQ ID NO: 1577 - DNA, 21418 bp, Unknown
  gut microbiota DNA sequence
cctgagtgattttaggattggttcctaaaacacttcctgaagaaacttttgctatttgagataccccaccatctatcgcatttaactttacagtggtcttcgaaaatgaatttgaagctgctaataccggcattgaaaacattaaacatgccataaaacatactgcaattgatgttaaagctctcttcttaatagtattcataaaaaatcctccttaagtcaaaacataaatattatcaaacagaatgctctcccgcaaaatggatactttttatatcattcgttcaaatgactttctaatcagttgactaccagattttactaataaagcatcaatggatttacttgtaattctatctaaaactcccggcatgataggttttccagcctcccatttagggtctgctacttttacggcatctgtgaatgcctgccaatactgtcgctcatactcctctaatgtataccctgctgctaatctgtcgtttttctcagtttgctgatacaacttttgatatatctctgatctgtttgttgtatcgccgttatgcaccccattttccataaaaaattcttttttagtgctttcaaacatctcatccataatgctttctgaaattgaaacaattctatttttgctagcacaatttttatctgtaacgagtaaccccgccaatcctgtgcgtggattaatccagtctccatctttatcatatcggctcattcgtttcttaatggctgagattgtagtatatccaccgccaccatctctggacatctcactcataacagctcgatattgtttactatttatatctattccagccgctttaagtctttcctttgtttcgttactattgataggcattccagacatttgctgaaatctattgctaaactctcttactataagcataattttctctccttgataaattactctgaaatccattttcttctttaacaaacgattatactcttgtcaaattaaatatcactttcttctttaaatatatcaaataaattgtattgttcaattgttcttgcagaaagtgactcctaattgcagaaaatgacactccaaatataaaattcccttgaatcaaaccaaagttcaattcaaggaatatcttcttatcgtttctttccaaccataacaggcatagattttgctgtcatactctcattcattgcttttatagtgttataggtatcatctcatatattataatgattcagctataatttaatggggctgtaaaataagtccctaattaagaaacgccaactccggcaaatgtcggttttgttgtttctttgtatgaatttttctatttttgaacaggtctgcatctttgggtataaaaaatggtgaatttaataaagctcagctaatcacgcttgagttttattcagctttcgtctgtcgttgcttttttgtacatgggaaatttcatgtgtttttccatgccgtgttcttcgcaataaagataattattgtaagaaccgtatccggcatcagcaacctgatatttcggataatgaccatatgtgcgattgaatttttccatcaatggtacaaagcattggatctatgtcaatacattggacacaaaaagtatataccggatcagaaatatcgatcaattttgcgatttctaatggtaatttcagctgacgcatagtataattaccattagtatagtctgttagtagcataattaattataccaaaaaatcgctcagacctcacggcctgggcgatttttttctaggggagtttttttacagccccattgctgtatcttgacataattccaacagctgctaagccgcttcgtacagcgaattttgtagcaagttctcctgcgaggctcctgttttatgcagtgtccagagatttttgctatttatctcctgttgttgacttccctatcaaaacatgtttcccgcaaaacgcaaacgcatatttatgaatcttttcctccggaattcctcttgcctccaacgttgcagcatacttcttatattcaatctgctccagcccggctttcactgtatcttccagatctttctctgtttccgaatcctgaaccttgaactcaataataaatgcatcatcgcacttatctcttggctccaacatcacatcgtatcttccgaatccactctcccggttcgaagtcacaatataacaatcctccagttctacaatcagccccagaacaaatggtacagacgtcagatttactactattttcaatttttctatcctgcatctcgtttcaaaactttttagaaccaatccagaaccacggtactgttatagaaccagagtatttttagtctttcaatctgcttaacagcatctgataatgccgctgtccgatatgtcgtccggcacgttgcagaccatccacgcattctctgacttcatccgatgtcagttcgtgttcctcataggctgccataagaatccctatcgtccccatgattctaagtcccatctgagctgatacatttcttccctttgcttcatccatcaataacagatctgcttttaattcatctgacaggacaatcgcttcactctcgccctggtcaagacctgccgctctttttaatatacttgctgattccggattattgacaggcttcactacgataaatttcttctgcctgatctcatcggcttccagccgaaatcgttcatcaactgtcagctcatcaaatactgcctgcggaatcaaaacatcgccaaacagtttttccagcaaatctatacgattgattttaagaagtgatatcagcggtgttgtatctgatacaacaatcataccgcagcctccttctttttgagttctctgaaagtattcagttcatcatccagatcatccatcgtcatatcaaaataggaatatcccagcttatcatacagatcaatcaactcggattttctgattcccagaatttcagccgcacgaccatgggatatcgtctgattcagtatatatggatacagcaacagtgcatttcgggtaagctctgtttccggattcatagttaccagatattttgacattcctaccggaactttaatagttacagattctgttgttaccataatatcacgtcctttctgttagaaatctatgttcgtctcttttcctatattattattatatccattatttggattttctacaactgatttttatctgcttttattcaagtaatcttcctcgtcaaaattgtgcgtattggaactattctggacgtgctatgttttacaatgcactacaaaagaatgggttaatttagaactgtacatatcccatttgttgcagtgtccagagatttttgctatttttatcttgttttaattatcaattgcttcgacaacctcctgtatatcatcagcagtgagttttgtcagcttatcatataagtcagcttcaagctcatcatccatatcaccatcttgaactttaataatatactctctgacttccattccaacctttacaaattcataatctccacaattgtaaatattatttaacccatatatgatcccacaataataaaacatctgcgcaaaattatcactttccctgcttattcctttaatattatcctgtaaaaatttctttgcctcctgcaattgtaaattaatagcttctttgtccaaagaattattctgcagattttctgcgtattttgatgcaagactatagccttctgttccggacttaaaagtctgatatgctatttcctgttgttcagtactaactttcatattattatcttctcttgtatttcccaggaaaagaactccagccataaagtacataattattatgattataagaacaattccaagaaaatacttatttattttcattttcctcaacaatttttccctccgcaatttttaatatcacatcacacacttcctttaaatcttctttatgatgagtggctacaataatcgttgctcctcttgacttctcctctcttattattttatatataagctgcactgcctcttcatccaatgcatttgtcggttcatcaagcaatataatcttttgattttcaaaaattgcctgtgcaatatttaatcgctgtttcattcccaatgaaaatttttttacttttttttcagagtcggggtccagacctactctttccagagaaaagattatatctttttcatcagctatattttttatctttgcaagcatctgaagatttctctttgcggaacattccggcagcaattccatattttctataacaataccggtctcaggtggaaactcaattttatcatgcagcttttccccatcaatgaaaatacttccactatccagatttatcaaaccacttatagctcttagcagcatagtctttcctgaaccattttgcccatataaaccataaacaaaaccacttttaaacgtatacgatacattatccaataccgtattttcctttatcctctttgttacattttgtaattgtatcatactatatcatctcctcagtaaatgtctgttttcttatattttattattgaaataatatttaaaatcactaataatataatcacatatgtaattgaagcttcgtatctcacatatatgtttttttgataaattatcccactacgcgttccaaatagcatattggggaaaagcataactccaatccggcttaaatcacgatttatcagtacgctatttccaattatcagggataccaccaaaaaaacatttacaaatatatttgaaatactggcatccataaataattcaagtaaaaattgtaattgtatcaatgtccatactccaacaaaatatgtaactattacctgtattaattttatacttgataaatcattccatgtcccatcacatattaaaaaaataatcgtctgacctattactatacaagctaatttcgctgctgataatatagcattttttaagtataacctctctctgctatacgatctgatcagccaaagcttaccatatccggttgtaatttctcttgcattacccgaaaagtaaaaaagtacaaatggcaatggtatatatgcatataaaatttgcactaaattacttgtttggttgtcaaaaataaaaagtgtactggcaaacggtaattgatatacctcatagtcactcatttgtatcacaactctttgcataataatcatgcatatgatcaatattatgtttaaccacttatttttcatttcttaaaatatccctttttgcaaacgttactattcctgctatgtacagaactattgccattactatattttttgcaagaatacccaaacagcttacaaacgatttatttccttccaaaaaattatatgctgcagcaacatctaaacctggtatccaaaacttaacgagccaaaatcttatcaaaatgaattgtacaaaattaactccaaaagctcctataagagcaataagttcattttgtaaacactctctaagtattttgtaaaaaagacctgtcgcgacaaagaaaatccaaataacaacaaattccataagagaatacagcacaaatggatatttcttaattgttgcaccattaaaactatataccgtaaaaatataatcaactatctgacgaactgccgaaaatattgccgccattacaataattatcctgatctggctattattatatttttcccgcgttttatatctaagtaatatatatgttttttctttgtccaatgcatagtatattcccaataagacaggaattgtatctacaaccaatatttctttaattccacagaaattactgcctgaattgtggatattcaggaaaatcacatcttccgttatccccatctgccctattgaattaagcataggtacatttgaaaaataacaatctatactacacaatcccacatatattaaagcgcatactaaatatttatacttcaacaatttttttctcccatataatagctgttataatcactaaaatgtaaagcactatacaccatatcgccactggaacaacaacattaaaatcatattccataaacggttgaaaaataagcattgatgaatttttaaacaaaattggtatgaaccagattgcaaaggtcaacgcatataccatctttctttcgtgtatagatattgccaacgcagctcccatcattcccaaaacgccggcaaatattgccgttataagaatgtagactatattcgttgtcaatggatgtgtatagcttatttcaaaaagaaatgtttttaccatgacaaaactgttatatttcaatggttctgcatcaaacggtgtatttgttcccccattaaatactatttgtgagagtataagatttaatcccaatcctacaaatacaattgtaaatgatacaataaaggctgatttcattttttgtaaaatatatttattttttcccattttacatatcaatatattcttatatcctgtaatataatcaacaatacactcttctcccactattacaagcaaatataatggcaaaaaacacagataaatcatttgaaatatgtgtccttgtgaatagcatgataaaaatgtgacatataacggatatggtttccccatttctccattaaatttaataatatcctgataataaatctgtacaatatccaaaattggaattacaagcataaaaattatcattcctatactttttttatcacttataattctgtttaattgctgtctcattttttcctttccttgtgttttttactaccgcattgttaccatagacgtctatgcttatatactaaactatatttctgaattatcggcttaatttattctaaatttttctgaattattatgtgattgctttttcagataacacaagctttgtaattttagaacttcagatttcttcagatttttttagatttaattaagcacattttacatttttatgtgctattatattttatattattatactacttaggagatatttgcgtatgaataaactacttattattgaagatgatgttactattagaaatgctcttaggattttgcttgaaaatcaaggttacttcatcgaagaagcgcatgacggtgaagaagggctccaaaaatttgactcaacctttgatctgctgattattgacataatgatgccaaatatttccggcattgatgtatgccgtaaaatcagggaaaaatcatatgttccgattctctttttgacagccaaatctcttgaaaccgataaaatggaagccctttctgccggaggggacgattatcttgtcaaaccattctcctacgtggagctgatagcgcgtattcaggctcttatcagaagatgtcgcgtctacgacaatgcagatgcatcagacaacaccgcttcatccactattgaacgatgtggcttaaccttagacacaaaatgcagcaatgtcagttacgatggcagacagcttgctctcacggataaagaatatcagattcttctgctgttaatttctcatccgacaaagacattttcaacacagaatatatttgaaagcgtctggaatgaaccgtatacacagttttccaataacaccattatggttcatattaaaaatctgcgcaataagcttgaagccggctgtggctgtgcccacctgattaaaacaatgtggggaaagggatataaatttgaagaataaatttaacggatataaggaatacataagcagcttattgatttcatttttaatagctttattgatttcaattgctgtatttacagctatatacctttgcggggaaaaaataataaatgaatatgtaagctccgacagctatatttacaatacacaagctgcgtatattacagactttcaaaaatatgtgtctgacaataaggtttcgtcaaacgattttaaaagcattgatacatggattcaaagagaaaagcccgaattttttctcatatccattgataatgaaacacattacgtttcaacagaatttttatgtctcaaaaagccccaaaatctatcattatataatcagaaaatatctgtttaccttaaagcgttaaactttagtgacagaacagctaaaatttttatatacaataactatcaggaaaaatatctcaaagctttgcttatttgtgatgctctcttcactttaattacagcaataatgattttgtttttcatttccagacatattctcatgcaaatacatggcactttaaacgttgtcgagcagtctgaaaccgaattgatcaatgaaaaaaatatgctgatacgaagcatggcacacgatatccgcactcctctcgcagggctacagtcatacgctgaaattatcaaaatggaaaataaaaagggtgcgattcccactgaacacatagatgtgattttcaataaaatatgcgaaataaaaggccttaccgaccagctttttgactattcacttgcctgcaatgaagaagctcttgagcttgatgctccttgcaatatggaaagtgcaataggtgactatctctctgagatggcttttatcctccgtgaaaacagcttttcacttgatatagaaaagctcatatggaaggatttcaaaatcactgtgaactcaaactttctcggacggatttttaacaatattacaaacaatatatgcaaatatgcagataaaaaagctcctgtctgcataagctctatctaccggagtaaagatgcaggtatcgagataacaaaccatatcgcagataaaagctctctgtttaataccaccggcatgggtatcagaaatattacccttatgatgaagcagatgaatggtcgggctattgtttcacataataataccgagtttcgcattactctttggttttcacgcgcataaaaacaatccgctacaccaaaatctggcatagcggattgatttatatacatctatctatttttatttatcaagcaaatctgtgtagaaatctgcgtaatgtgtctcacctgacttgatgtagtcaatggctgctgatggatgctgatttaagcgtcctgtgagcaggtatggaatatcgtagccccatacagcaccgctctccttgagcggaagcatatgctcttcaatgaatttgagtacagggaatacgttgtattttggatttttgaggaagctgagtaaaagctccatcgcacagtttcctgcgcctcgtcccatgcccatcattgttgcatccaacaggctgactccctgggctgctgcctctatggtgtttgcaaatgcaagctgctgattattgtgtgcgtgcattcctacgaactttccgtttgcctcagcaatttctgtgtatttatcggcagtgcggcgaatctgctcagggtagagagctccgtagctgtctacgatgtatatgccgtctgcagagctcttggcaaccatgtcaagtgcctgatcaaggtctgattcctgtgtatttgagatggccatgatgttgcaggttacctcgtagcccttggacttggcatcctcaatcatctcgattgctgcaggcatctgatgtacatatgtagccacacgcaccatgtcaatcacactgtcctcgcgagggagaatatccttcttgtagtcacatctgccgacatccgccatgacagaaatcttcatatcagagttgttgtctccgactatctcacggatagcagcctcatcacagaacttccatttgccgaatttatttacatcaaaaagctccttagatgctttataaccaaactccatatagtcgatgcctgcctttacgtttgcacgataaagagcattgataaaatcatctgtaaacataaaattgtttaccagtcctccatccctaatggtagcgtcaagcacgcggatatcagggcgtgctgtcattaaatcacctttctgagccatttttgtttcctccaagtataaatattattgtaacaaatataaatattactgtagcttgatgttacaatttaaagttttaatgcttcaacgctttaaagcatataagtataataacacaattatttaaaattgcaagtaaaactttacttttttttgtcagactaatataatgaatgaggttgtaatacaatatcaaaggaggactatatgatttcttatttgacttcggcagatatgtcgataatagctttcatcggagtgatttttgcattcgcactcacatgtattgctattgcaaaattaaataaatttttaccaaaggacctcggcagacagtttgctgtggacggaaagctttcagccgggaagccgagaggcgctggtattatctttatattcacatttgtgatatcggcagtgcttttctcacaaatcaatgcggagattgccatttatcttgtgcttatagttattgagatgctcacaggctactttgacgatgcggcagaaaagccatggggcgagtatttaaagggcgcacttgattttgcggttgccattgttgtggcagttgtgtatctgcatttcaactcaagcacaatcgcctttgccatatttggcggctctgtaaatattccacctgttgtgtttggaatacttacagtcatcttagtctgggtatcaatcaatgtcacaaactgttcagacggtgttgatggtctttccggaacacttaccatcattaccataatgaccttcttcgtgcttgattcagtgctcaaaatagctgacagcttcaactattgtattttattatttgcggtatgtctgctcggatatctgtggtacaatgccacaccaagcaagcttttgatgggtgatgcgggctcaagagccatgggtatattcatagctatttgtgctcttaaatcacaaagcccattcatctacatactggcgggtctcgtgcttatcatcgatggtggacttggactcgtaaaggtttctcttcttagatttttgaagatacgtattttaaagaataccacaactcctatccatgaccacgtcagaaagaagctcggctggtcaaatgcacaggtcgttttcagatttgcaattatccagattgttgtgtcactcgcgacggtttatctggcgatgatttaacagttttaaactatatacagcaaaagccggagtctgacaatttgtcggctccggcttttcatactttcggctcgtaactgtgaatgtaccaaacagttacatacttatataatttactgtgtggactcctttaacactacctcatacggcagaagtgtcctgttctcagtctcttcaccctctatctgtctgagcagattcttgcaggctcttgctccaagctcctttgaatcaaatgaaagcgatgtaatggacggcacattattttccagcactgagctgttgtaaaatgaagccaccttcacctgctgcggcacctttatatgcctttcgcggagccgtctcatggcctgcgcacagactgcatcatccatacacagcagacagtcacagcctctgtcaattgcatcatctacagccttttcgacatatgctttgccttcaaggtttaaaaatacaagattgtcatttattttctttccaaactgctcatgggcatccactacgcctgcgtatctggtctgatttacaacaatatcctcgcttcctccgagaagcgccatatttttcatgccacgcatgagcataattgatgtcagctccctgcaggcacttctatggtcatggtcaatctgctttacatccttatatttgcatgagccagctgtaacaaacggtatcctgcgctcctgcaagaatgtcacctgtggatcatctaccatcgtgcgaagcagcaccactccatccaccttatgattctgtatgatacgcctaagccccgccatatcattgcctgagcctatacaaagcaaaaggtcgtattccatcatacctgctatctcctgaattcccattatagcttcctggaaaaatggcagatcgacaagtgcataatcccccggcatcaccacacatatattaaatgtctttgactgtgcaagccccctggctattacattaggtttataatcatgctcctgtatatattcaagcactctttttcttgttgcagcgcctatcctgccctttcccgatatagccctgcttactgttgtctttgaaacgccaagtgcctctgctacatctgatatcgtgatattgttactcattctgccgcctctttcatctaaatgtgattaatcactgaacaacttttatttgttgcgcaactctattgtttttcattataacctatcttcatacacttgtcatcctagacatgcaatttttgcgcaactgactcattcttccacgcatattcgctcaacattttgttttctgatgatttaatatttacaccatttatttactaacgtatatttatggtataactattggaggtacatataaatgaattttaacgaaatattatatggtgtggcatattacgacgaatatatgccttacgaccgcatagaaacagattttaagatgatacgcgatgccggcatgaatgttatcaggattgccgaatccacctggagcacatgggagcctaaggagggagtatttgattttacacacctgcaccgcatgcttgactgcgcagcaaaatatgagctgaaggtcattgtcggaacacctacatatgctgttccatcatggcttgcaaaaaaatatcccgatattctcgctgtaacacataacggcaaagagctctacggccaccgccagaacatggatatcacaaaccctgactatctgcaccatgcacagattatcattgaaaagctcatggagcaggtaaaggactacgactgcgtgatcggcttccagctcgacaatgagacaaaaccttatgacacctgttccaaatacgcacaggctaaatttgtagaatatctgaagaatgaatttcctgacattgacgagtttaacagggagtttggacttgattactggagcaaccgtgtggatgactgggatgcctttcctgatatccgcggcaccataaatatgagccttgatgcggaatacaaaaaattccagagaaagctcgtgacagacttttttgcatggcaggccgatatcgtcaaaaaatacaagagagatgaccagttcatcactcacaatttcgactttgaatggcacgattactcttacggcatgcagccggaggtcaatcagtacgaggctgccaagtgtatggatatcgcaggctgcgatatatatcacccttcccagagcagtctgagcggccgcgagattaccgcctgcggcaatattgcaaggggcataaaaggtgatacttatctggtgcttgagaccgaggcagccggaaatcacccatggcttccttatccgggacagctgaggcttcaggccataagccacatcgcaaacggtgcatgcatggttgaatactggcactggcattctatccacaatgccatagaaagctactggaagggcgtgctctcccacgaccttagaccgaaccggctttataaggagtgcagtgttatcggaaacgaactaaaaaaatacggacacaggctggtcaatttaaaaaagacaaacaagtttgcggttattgctgacaacgcttctcttacagggcttaatgaatttaagctaaacaacgaaagcgactccaattacaataccgttttcagatggctttgcgatgccctgtatctgatgaacattgagtacgacgtgattcctgccgatccggcactttttgcttcatatgaaaatatacttgtgcctgcactctatagcgcaacagatgaggtgctcaatgccttaaatgaatttgttgcaaacggtggcaatatggtggtgacgtttaaatctgctttttcagatgaacaccttaaaatacgccatgacgtgcagccttatattataaacaaggctctcggcatacagtacgatgagttcaccctgcctgacgatgtcaccgtaacctgtggtggcaaatcatcaaaagcgcgtgactggatggagatggtcgactgtaccactgccacacctgttgctatatatgagcacaagcactggggagtacacgcagctatcacagaaaactcttatggcaaaggacgcgccatgtatcttgccacactttttggtgaggacacactgatagaagccctaaagcttttcttcggcgagccaaaaaatgaatttgatgcttcttatcccgttgtcataaagcgcggcaccaatatgcagggagaaaaaatcatttatctgcttaactactcggatgatgagcagactgttacctgctatgcagacggtctcaagaagctttgcgatgacagtactgtatcagcaggcgattgtatagctcttgcaccatgggattttagcattctttatgctgattaaaccatagcttatatcctatgctttttgctgcagataaatatttcacaaaaagctcattatataaggtcttaattattaattttttcataaaatttattaagtcttttgttttggtgttgtttgaattatttttcagtgttataatttcaagcggattaaaaaggtggttttatgaagaaaatacagaataagcttatagagcttttcaaccgctacaagcatgtgtggattttatcatactttatcatatatctgacctggtttggatatttagagcgcactgttaccacacattatcacttgattcatcttccgatagatgattatataccgttttgtgaatactttgttattccttatatcatgtggtttggctatgtggcctttggaattgctttcacggcattacatgacaaaaaagaattttacagactgtgtgcgtttttatacaccggtatgaccgtatttttggttatatcaacgctctacccgaatggtcacaatttaaggccttattatttcacgcaccacaatatgtttacagcgctttgcgagtggctttactccactgacacaccgacgaacctgtttccgagcatccacgtatacaattcgcttggaattcattttgcggtgatgcacagcagctatttcaaggataaaaagcacgttcagcatgcatcattagtgctttgtgttctgattatactgtctaccatgtttatcaaacagcactcagtatttgatgtttctacagcctttatgcttgctttcgttatgtacaatgtggtctacatcaaaaactggatgcatctgccacagaagagcggaagcttccaggatgcggcaaacagcaaggttcgtgtttgatttaatgattgcagctttcaactcaaaaagacatcagccggaatttacaccggttgatgtctttttatatttcactcataagaatgcatgactctcacagtctgcatatctgtcctgttatctcactctctccctgctgtagtcgagcaccttgtccacagtggattttatttctactgaatttttcctctgagtcgaaatttctgcatatgcatcctctatctgcagcttattgcgctcctcaaacttgataatctcctcctgtgtattgcggattgacacaatctgctgtctgcacgcttctatcatgtcaactgaaatctcatcacactgtgaaaacacatgattgagctccactccctgcttcatgagctttgtcgtggcaacattgttgtcctttagaagccctacaaggtggctcacctgctctttaagtgcactaatctcagcttttgcctctgaaagctcctgttcaacagcatcaattgcactgtcatatgaaaccgatgcctcccttatgctctcagcagcctccacgaacagctttccctgctctccaagcatgcccgcctctatagccgcatttagtgagagaacactcatctgcttattctgctccttcatctgcgcagctatatccgcacagctatccacatgctcctcaagcctgtccgatgtctctgacaagctcttagccggagctgtaaaatgcttattgttttcgacaagcgcacatgtatcctcatgctgtgtggcaattgcctttgccgcactctcaagacttgtaagattgtccgcagccgcctttacacactctgtaaagctgtcgtttaaggccgatatggcatccatgctgtcctttgaaaattccaccacattatttgcattatcattcagctgcttaagggatgactcctcaagctgtcttgatttctccagctcatcaaaatcagcctctataagctttgactttgcatttacattctcgaaaaatcccctgtcattatccaattgttccttcatatacgctaattcctcagcggatatttttgctctgttcccaaacactgatctattctcctttaccggttacctttttagaatataatatcacttataatactgtatttcaaactgcagtgactcattttccctgaatacatttatctttggtgaatatactacggacagcactatattattgaaccttcctctttgtgcagcttcaagcgcgtcagaaccaaacctttgcctgatataatcaaaaaagctttctatatcaccaaaataaattgcattgattggcgtgccatatgaggatatcaaagaaagcctaagcacattattgtttttaccaactacccacatgcggctcacacgtagatttttgtctgcaaaaacaggctttggattgtcctttccaaacggtgccagtactgaaaactcagacaccagtcccattgatacataatccaccggcatcggcacatctatatgtattttaggcacgaggtcatcgtcagtaagcgatgcatactcatttattttctgacggaatggctcaacgttttcttgtggcagtgaaagtcctgcagccatcgggtggccaccaaacttcgtgaacagctcactgcatttgcacatttcctcatacatggagtactcctctatcgagcgccctgagccctttactccgtcctcactctttgtgagtataaaggttggcttattgtatctctccctgatacggcctgctatgattccagctatgctctcatgcacatccggcagatatatgacaagcaccctgtctttttcgtaattgtccctctcatatatctcaactgcggtttcgacgccctttgcagtcatttccttcctgtcatcattgagtgctacaagctctgatgcgatgcgcatggcctcatcctgcctgtcgcataaaaacagctcaagtgctcttttggctgtatccagacggcctgtcgcattgacacaaggtccaagaacaaatccaaaatgatatgcatctacattttcagcctctatattacaacattcaagcagggctttcatgccgatatttgtcgtatgatgaatactctttaaaccggcctttacgagtatacggttttcacccgtcagcggcatgacatcaccgactgttgcaaatgccacattctctataaaatccatggcctctttctcatctatgccaatttttctatataacaatatgacaattttccaggcaacagctgctccgcaaagctctttgtacggatagctgcactctatctgatgcggatttacaacggcatctgctttgctctccttgtaaatctttataccctttatatcttcaaaaggcactgcatggtggtctgttacgagaaccgtcattccaagctcctttgcatgggcgatttcctcaatcgccgcaattccgttgtcacaggtgaccacagtgtctatcccgtcctcatatgccttgtcaatcagatgcacattcaaaccatagccatccttcactctgtcgggaatcatataatccacacatgcaccggctcttttaagtgccttcacaagaatatatgtagacatcactccgtctatatcatagtcaccgattatcctgattttggccttgtcagctatcttttgggcaagaatgtcaaccagcctctgaccatcctttaaaagagctggatctgcaatgtctgagattttgccgtttaaaaattcatttaccgcgtcatctcctataacacctctgtttctgattatccgcgccgtcacctgatctattccaaacttcgctccgattgccgcaaaatcagccttcttcgcactaacataccactttgccataatctaccctttccagtctcagcccacacgccggtgctgtgtagcctgcctgtgccctatcctttgaagctaaaatttccatcacagcatccggatttttccttccatcgcccacctcgataagcgttcctgtgatgattcttatcatattctgtaaaaatccatctccggtgtagctgataacaatatcagcgcctgttttttctatatcaatagaaaaaatcgtcctgaccgttgactttttcatatgtctgttgccacaaaaggctttaaaatcatgctctccgagaagatacgctgctgcttttttcatccggtctgtgtcaagcggcttatcatagtcgtatacatattttctcctgaacacatctgacacaataccggtgtgtattgtatacacatatgtctttgagacggcattgtacctggcatgaaatctgtcaggcacatttgaaatatctgtcaccgcaatatctgccggcagatgctcattcagccatataaatatctcatccttggaaaaatgcttcggcatgtgaaagcttgccacctgccccaccgcatgcactccagcatccgtgcgccctgagcctatgacctcaaccggctttcctgccagcgttgaaagcacatgctgaagctttccctgtattgtatcatctgtggatttctgcacctgccagcctttgtagcgtgtgccgtcgtatgccacaattatcttgtaattttgggtttctgtattcataaaattgtctttctttatctaaaaaaatagggttgtgaatagttacttttattttagctcctttaatccaattaagcaagctccgcaatacgtgtcacagcgacatatatatttgatatctcataccatgtattgtaatccaccacacctgataccggaagtccgaatacagcctgaaatttttccacggccgcctttgtctttggtccgtatattccatccggcacaatagatggaattgccggatatgcctttgcgatgcgggcgagctgtttttgtatctggtatacattctgccctgacgagcctatgcctatattgtagccgggccatgacgccgggattcctgatacagcctccgcggtattgatatacatgttgctgccgtaaaagtatctgagtatctcaattgcactgtagccctggtcaccgagacttttagagccccactgtgtcatccagctcggacaggaaaccttctgtccgtcacaatactgcgtcagaatcggctgcttcacattaggtctcgacagatagttttcaaacatttcatttactatcagcgagatattgtcatatatatttctgccatagatgaatttgtggtcatatgccgtggacgaagtgatattaaaattatagccctttccgcgataaaactccgtatatatcctgtttaatgtaaatgacataattgcaagcacatttgcccttatagtggcatcaggccatgtcgcatatatctcactggatgcgacatttttgatgtagtccttatatctgacataataatttgccgctgtggaatccgatggtgccccatcatgcacaataacatattccggaatcacaacacgattaagtacaatctcaccggtctcagcaaccggcataatctccggctcaggtatcttggcaggataatcaccataaagtgtatgtgccggaataacaatattgtccacatcatttcccggtgcatcaagtacttccagctcaatatcctgtatggaaagtctgtcgggcatcacctcaacgcccgaaaccgtgatatttctgtatccgttagctgaaacagttaccgtcacctccgaatacggctgtgactcactgggcgacatagagtactcaagtggcggagtggcaatctcaactgcctctatgcttcccgattcgttggtatcagtctcctctatctttccctgcggatccccggaatagctgactgacacccttgcatccgcaaccggcgtccccatgtttttctgtcgtactctcacctgaagccgcccctcatcaatagactcctgttgtaaaatgtgcagatttttcatgaatattattaccttaatatctttttacaataatatgcacaaagtgcagcgcatatgatataatgagcgtaagcaacgagcagtgccaaattgaaaatatataaaatgccagcttgctgagcactttttatatatttttaatttgatagggcgactgcccgtacagtcaggaaaatctcagatttttctgacttgcactgcatacaatacacttactaaggtggttgggggacgtgctctcatctgatccgagtcttacggaaaggatgattattatggtttcttggaacgacttatttactttcgttatcatgctggtagcgattctgacatacatagatactcacagaaaacataagaaatagccgtcctgcctctggtaaagtctgggaacggctatctcttacgataacttattaacttaatttgccggatcaggtgaagtgcactcacctaccgactgccttactaagtgtattatatgtcacttagcagcttttgtcaattttattaatattcaggaggaaaattatgcatacatttcaaccatatccaatcgacatgctcgatatcaatccattcaccaagctcagtaaggagtgggctctcgtgacagccggtgacaaagaaaaatcaaataccatgactgtttcatggggtggaaccggtgttctctggggcaaaaatgtcgtatttatttttatcagggaatcaagatatactaaggatttcatagacaatggtgagtttttctcactttctttcctaagcgagaaataccgcgatgccctaaaatactgtggtgctcactcaggacgtggcgaagacaaatggtcaaaggccggtctgactcctgcaatacgccatggcatcccatatcctgacgaagcaaatctcgtattcctctgccgcaagatggctgctgtacctattgaggaggcttcatttacagacaaagccattatgcatcaatggtatggtgatcacgatatgcacactatgtatgttggtgaaattatcgaggttgcagctcgctaatttattgcaatactacggaatgaggtctgcatatgtatgtgtttgtgcgctcagtactacgtggccaagattctgtaagaattatgct

SEQ ID NO: 1578 - DNA, 2047 bp, Unknown
  gut microbiota DNA sequence
aggggtggacatggaacttgaagacaaggaaaatgggggatgtgatagagggagaggatcagctgggctggtcctttttcagtggagttaaacttgtctgagtaatatgctacaaacaagtttgtggactgaaaaaaccaaaataaaagtgccgaaaaatacaagacgcaaaacattaagcaaacgcaataattaaacgcaaaatatcgaattgatttgactttttgcgttttactgaggtataatttgcgtaagatgaggaataatattgcgaaggacaggagctgatatatatatgaaaacttgtaaagaaaaggctttagagtggaatgtttctccacgttccgtaaatgatatgtgcaaaaaaggaagaatacagggtgcaataaaagaaaaaggatcttggttaattccagacgattctccaaagccaatggatggaagagtgtctaatggaaaatacatcaagaaaaatatggttgcgaaagcagaagttaaatcattaccaatcggcatctctgactatgttcgtgcgcaggaagaatattactatgtcgacaagacgttattaatcaaagaattcttggatcaaaagccattggtatctttgtttacgagaccaaggagattcggaaagaccttgaatatggatatgctcagagtgttctttgaaatatcagataagaatactagtaagtattttgccgataaaaatatttggcaatgtggagaagagtatcgttcacatcaaggaaaatatccagtcatattcttaacttttaaggatgttaaatttgatacttgggacgcaacaatagataaaataaggggactacttcaagaagagtatggaagacatcaagagctactaaatagtgataagctcgcacaatatgagaaggagtattttacaaagattattagcgctacagctaatgaagtggagcttacttcttcgctagaaagactatctaaaatgcttgcttcacattatgataaggctccagtaatcattattgatgaatatgatactccgattcaagagggatactctaaggatttctacgatgaaattattggattcatgagaaatttcttttcaggagcatttaaggataataagaatttatcctatggtttcctaacaggaattttgcgtattgcgcaggaaagtatctttagtggtctaaataatttaacagtgaactccgtaatggatgaagaatacgatagcttttttggatttacagaatctgaagtgaaagcaatgctcagttactatggagtatcagataaagaggaggaacttaaagactggtacgatggatatttgtttggtagcgaagaaatatataatccatggtctgtaatcaactatatttccaagggatgccttcctcaagcatattgggtaaatacaagaaaaaatgaaatccttgatgatgtactaagagtagctacagatgatattacagaaagattatatgaccttttgcaaggagaaagagtagttgcaagaattgatcaaaatgtggtgtatagatcgcttgcggaggatccagcaaatatttatagcttattgttggttgctggctatttgaaaactcctaaaaaggaactgcaagcagatggttcatatttatgtgaagtatcaattccaaatagagagattgcagctgtatataagagtgaaatcttgtcacatttcttgcaaactggagcaattacaaggactacagcaaataagattgcagaaagtctttatgccaatgattacaagaagttgcagagcgctattggggaatatatggataaatcaattagcttcttcgatggtggagctgaaggattttatcatggtttgatgctaggattaatagcattaatcgataatcagtataagattaaatcgaaccgagaatctggagatggcagatttgatgtttctttaattccaagagaaaaaaggtatcctggtattattttggaattaaagtggaaagaaaaattaagcgatgttgagcttgaaaaatggtctaatgaagca

SEQ ID NO: 1579 - DNA, 985 bp, Unknown
  gut microbiota DNA sequence
ataagccttatactttgtctatcgttactttgccccattgtacagaatactacagaatatcctaaaatatggcgagttttcgaacgtatataatggagggattgatatggataataataagattcaaaaaattttccactatataatagttcttttgctcgtgattctttggtttattatgatgtttttccctgagcacatagatactatgaattttaaaatatttttttctatttcacttgcttgtagcataatttactctttatgtagagagaaatactttcctatacaaacagacagtaaaacagaaaaatttgtttttacctttttaataatattgcttttttttaggtttctgtttttgaaaaattaagttatagaaatacttttgtctacagttgaagcggctatcctttgagatagccgcttttttcgtaaaaaatcatttatcattatctttgttcagcctatgagaaaaattctcatgggcgttttattttgattcatcacttgactttgtggcaaagaaagcacatccattaagcatattttggagtaaatcctgctgatcctttctcatcgcttactgatgaaggcatagaaaaagctatggattatattaatctgcttcacgcatccggaatatatgaaaagcagactgctaagataattccattccgaagcattgatatttttgaaaatgcagtatcagccggaaccggtagcttccttgtagacggaccgaaagagactgtacgcatagatgaatctatcctgccggaggatactactttcggcgtccgtattagtggtgacagtatggaacctgaattccatgatggtcagattgcatgggtattacagcaggaatctgttgctaatggagaaatcggcatattcgctcttaacggagaagcctatattaagaaattacaaaacgataaagacggaattttccttatctcactcaatgaaaagtatgcac

SEQ ID NO: 1580 - DNA, 2518 bp, Unknown
  gut microbiota DNA sequence
atatgcagacctcattccttactctatgctaatattactcaaatttaaacattgtacaacaacacatacaaattgtcctcgcattactgtcacaagattctatatataatctagcggcagccggtactcatagcctcaatggccacggcaccaccacgcacaacagagatatgcttgtactgtgactttagcagcgctataagatcatcattgcggtgctctgtaagcttgctctccaaaatcacgctgtcggcattcttgtccaccacgtcaatattaaaaacctgcgctgtctggaagatatcggtgatttcctcgcgggtgagcttagataccctgacatagaggatttccttcatatgcagaggcacatcagtcaggtcaataaccttgatgacctcgaccattctgttgagctgcttttttatctgctcaaatgtaatatcatcgcttgtaacacaaatagtcattctggaaatagtctcatcctctgttgttccaaccgtaagagactgtaaattgtaggattttgcagagaaaagtccggaaacctttgccaaaacaccgacctgattctccacataaagtgcaatccatctgtttttcatttcaatattattcatcttctgcacctcctactttaaaatcatttcgctcataggatttccgctcttgaccattggaaggacaatctcatccgtagcaatcataaactcaataattacaggtacatccttatatttcttggcctctgcaaaggctgcatcgatatcctcttccttttccacgcggattccgtgtccaccatagctttcaacaagcttgagaaaatccggtgtgtatggcggacatgcctcgtttggtcccttgcactcatccgggcatccctttcttcttcgaaggcaggttgcagaataacgcttgccataaaaaagctgctgcatctggcgcaccatgcccagatagtagttgttgagcacgcatatggtcactcctgctccctgtacaactgaggtggcaagctcctgtatattcatctgaagtccaccgtcaccgcttatgcatacaacatccttgtcaggatttgcaatctttgcacctattgctgccggaagaccaaagcccatggttccaagacctcccgatgtaagaagctggctgttgctgtcaagctctaagtactgtgtagcccacatctgatgctgccctacatctgtaacgtagattgcatctttataattcttattgatatgctccataatcatctgaggtgtcatgcccttgtctcttctcatgccaagaggattttcctcatcccatgccttaatctgcttctgccactcagcagtctttttcggctcagcccactcgtttaacttgtcgagcgccacattggcatctgcaacgataggcacatcaaccactacatttcgtgaaatagatgcagtatccacatcaatatgtacaatctttgccttcggagcgaactcatttaagtcaccggttattctgtcattaaatcgtgtacctattgaaaaaagtaaatcacactcactgactgccttgtttgccgcatatttgccgtgcataccacagtttcccacataaagcggatgagtggtcggtatggcacccttacccattattgtagtgacaacaggcacattctctgcctccacaaaacgacgcagattttcattggctctggcaacatttataccgcctcctgcaaggataagcggttttttggcactctttaacatcttgtaggcgcgcttaagctgtccgacatgtactgtatcatttacacgatagcctctgatttccaccttatccggatactctgccggaccggatgcagtctgtatatcctttggcaagtcaatcagtacaggtccaggctttccggtccttgcaatatgaaatgccatctttatgatttttccaaggtcctttctgtcacggactgtaacagaatactttgtgatatttctggtgattccgactatatccacttcctgaaaggcatcatttccgataagtggaagcggtacctgtcctgtaaagcacacaagtggcacattgtcgtaatgcgcatccgcaagacctgtaactgtgttggtagcaccgggaccgcttgtcacaaggcagacacccaccttacctgtagacttggcatagccctcagcctcatgaatcaggccctgctcatgtctcggcagaaccagattgattgaattagtcttatataactcatcgaataaatctgtaactgttcctccaggataggcgaaaatagtatctacgccttcctcctccaacgcttttacaaataattttcttcctgtgatgtccatactgctgtcatcctcgtttctattttatttaatagtctattttactttctcgtatcgaaggaaataaaactctaaatcaaagtatgtctgctcttcgctgtcccccgtaatctgccactcaggcttctcgtcaagatttggaaaatatgcatccgcatcat

SEQ ID NO: 1581 - DNA, 1835 bp, Unknown
  gut microbiota DNA sequence
caaacgacgaaaccttcacaagggttgacgttgagacagtagcagctatcaatctgtttgtaggaactgacattaagtatgatgaaaatgaagaggtggtaaatatgtgtaaggcatgggatgatcataaaaagcgtggcattcaggaaggccgatatcttgaaatatattcgttagtacaggatggcataatagagccggaattaggggcaaagcgactgaatatgccgtttgcagactttgaaagagcgatgcaaaaggcgggatacaagcttccggagcctgtataataaagtaaatgaaaaaaggaaccaacgtcacaggttccttttatattgcaattttatattataatgctctaatcaaccagtcccttagtcttccactttccgctcttccagcgcagcaccataccgacagccctgatgcactcgtcacttgcgagtccgatgtaggcaccgactgcgagaagccctagatgcagtccgaagaagtatgttccaccgaccgccgcaaggtacataaaaacagcacccatgacaaccgggaatacggcgtcaccgcttgtcttcagtgcctgaccatagaccagattggtgactcttccaagctccagcacaatatcgatggcgagaagctttgtgacaagatttatcatttgtacgtcattcgtgaagattcgtacaatatagttacctaaaagggcaaaagcgatagaaaggcaggatgccgtaattacaccgtagatagcggccttgcgagtgcccctatcacattcgtcatactcctttgctccgatatgccagccggtcaggatggcgtttgcctgagctaaggcagcaccgatacagtacgaaaagttggcaatctgtgtggcataagagcgcgcagtgacgttcattccgtcagcatccatctggttcatgaatcgcactacaagagtcattgcgatattgtaaagcgcggtttcacaggcagacgggaagccaatctttataatctgtccgagaatttttccgggagctatgcgctcgggactgtcctttgccttgatgagcacagcacccattgtggcaacaataatcagattgataatacgtgagataaccgttgcagtggcaacacccatgacgccccagttcattacaaagagaaaaacagcattaagtataaagttaatgacatttccaataattgatgcccaaagggattgctttgtgtagccgaaaactctcaggtagcttgaaaaaatcggtatgagagcatttaaaaagcaggcacctccaacaatgcgcagataagtatttgccgaattaaaaagcgccggtgcaatgctgaccattttaagaatattaccggaaaaaacagccagaaatacagacatgagcacacctattacagcattaaatataagcccaagctgccttgcctgatatgctatacccggttttccggcaccgatattctgcgtcatgacagcaaccataccgcttgagatgacaccaaacatgatgatgaaaacggagatatatgtatttgccgtgccgacagcaccaaccgcctggtcgctcacggatgatagcataagagtgtcgaccatgcctgacagcatataaaaaagtgtttcaaagcatattggaatggaaagctgtgtaagtgtttttctttgaacctgcatatagattacctcatttataatgtatgtatactttgcgatattaacagaaagaatgcaaacttcttattataaacttcatttgggagagtaagatataaagaagagaagcttgcatgcatcaatcaatatattacattatcacaaataattcttgtat

SEQ ID NO: 1582 - DNA, 852 bp, Unknown
  gut microbiota DNA sequence
aaatccaggggggctatatgacgcaacttgttttgagaacacctcaccaaacgacataagaccaataaaaaatgatgcaaacgcttcatatatcagctttcaaacgatattaattaaatggaaattcatcatcatcacaggacaaatcttccatatcactgaacacacacatataatgtgttcttaaagcttcaactaaagcgcaacaatcacgcatagaagcacttggaaaacgaccagacagataataaaaaatatagatgttggttacaaaatccattgggttacttgaatgaaacttatcaatataagcctttgtttcgatgaacatttcaaatttagtactttttttcattttcttctttcctctactttcttctttctttttactctttgactaaggtaatcaaggggattcccacccttcggggacaatccccgttgggcaaaattgtcttgaatcttggcttgtcaaggctaaagtgaactgctggcgcaggccttgacaatttgcaaccttttctttagatgcacaaaaaaagtgcaatccgtaagacagacttacgaattgcactttttttaaatgcactatatttaattaaaatgatgcttaccaacgcttgaagcctgcgagagcaggaacacagcagaaaaaagaatcgtgtcatttaattcgtcaaacaagtatttcacaaatagttgacaagcaagcgccctccgacgggagaatggatgtcgggcgctgtcaactaccgcttccccgatttttgacttgcagaccagtcaaaaaacgctttcgtgaaacatttcacagtttaacgaataaatgacatcataaacagtaccatagta

SEQ ID NO: 1583 - DNA, 2528 bp, Unknown
  gut microbiota DNA sequence
taataagacatacgcgaatatatctcgcccatctgtgtggtaaacaggaagaaggtcgttattatttccacaagtgccacatgcttacatgtagctatgaactcatcgagatagccgcgcttcaatacatttttgaaggcatcggatactatttccacgaagaaatctatgagcagaaatgctactgccagtatcctgtagtctttatctatgtatggattgccaggtccaaagcgccatatgtatgagactatgaatgctatctgcatacacaggacatctaagagcataaagtctatatgctttgtccagcctcttcctttctttctgtacattttttctgtgtctccctgtatttcttgattaccctatttccagttcatccctatactgtcaagccttgctatgcgctctgtgtcgagcaccatgccgctggcgttagggttttttcttttgcatctgatatttgatatccagcgtcccagcttcactccgtctgtggagtatgatactggtacgtccagattgccgtttttctcgtaatatgtttttgcaagctcaaatttcctgttccactgtatggcagtcttgctttctgacctgtagcctatgctctgcaggcgctttagctgctcgtttgtcattaagtggctattggtctggtttgacagccaccgtccaagtggtatgccgtctgctgtgacgtactttgcaggtacttcgaggtttccatgctccttgtagtaggccttggctgcgctgtagtactcttcccacttctgcttgttgtggtcccatatcatgccaagctcctcaagtgcttttctctgctcatcggtgagtgcctgctctatgccgtactttttcaccttgaagcgtatgttgttgatccatgagccgagcctaaagcctgtaggcgacacgtatttggccttgatgtccagattgccgtaggtattgcggtagcatttcagctcttcaagtacctcctgccagcttgagtccgtgacatcccatatcatgcctatgtcgtttagcttttgtatcttttcccaggtgaggtttccggatatatttcctgacttcacacgcctctgggtgtttatccatgctcccagcgtgagtcctgacccagtgacatagctctttggtatcttgagatttccattttcctcataccactgctttgctgcctcatagtatgtgtcccaggcactccccagattttcctgcaggcgcataaatatatccctgctgtccttggtctcgtcaatgatgcggaatctgtcgtcaaagtgctctctgggcgagtgagtgtccggatatagcaaaaatgcttcctgcatctcgtttttcaggcagtctatgcaatagaggctgtcgaaattgttgaccaggtcaaatatgaccggctggtttttgcttcctgctgacaatgctctgcctatctgctgcagatagatgattggtgacaccgtagggcgaagcagtattactccgtccacatcgtccacatgtatgccctcgttcagcatgtctatgcagtagaggagctttaaatgacttcctgtgtcctttttgaaatcggcaaaggctttgctggtcgatgcatcgttgtagtacgctgtgtatatgtgtggctttttgtccaccttgctaaaccagtcggtagcctgctccttcatctcatccatgtgctctctgcctgagcagaatactatgtatttgccatccggcttcgtcatctgtctggcaaagacctctgtgaggccgtctgcctgctcgagtgcacgctttagctgctctagaagcttttcattttccgatacaagtcccgggtttgataagccctcgattcgttttttcagttgttcgagctctttcttgtatgaatacatggctataacatatttaggctccggaagtatttccctcacgattgcttctccgagtgtcatctctgaggctatgttgccctcaaagagctcctctgccatattgcgttggttgtccagatagcgtatgtttgtcgctgagagccccaggcgctttgccttcggatatgcttcaaggagctttttcacactcttgccccactctgcggctccacagcggtggaactcatcgagtatgatatagtcagggtgcagggtgtctatgctgtcctcatgcttcatgagtctgctgtacgacatgtattttatgtttgagaactgtgtgtctatgttctcaagctgtgtcttgtatatatactcacttggtgatagccatagaaagtgtttgtgtggatgctgctccacgagcttgaaggctatcatcgacttgcccgtgcctgtcggatggatgacggctgccatctgcttttcctccagcatggtctcgactgctctgtatgcatcttcgttgtgtttgtaaagatgtatgctcatttgctgcctccgggtgaaacactacattaaaagggaggttggatttcgcagattattacaatctgcgaaatccaacctcccttatgtataaaataagca

SEQ ID NO: 1584 - DNA, 305 bp, Unknown
  gut microbiota DNA sequence
tggatccttctgtttatcagtctggtaactttcaggctaagacaacaaggatgtccaaacgtggctctcgtgttttacgatatgcccttgtaaatgcagcttggaacgttgtcagaaacaacgcaaccttcaaggcttattatgatgccaagagggctgaaggccggtctcactacaatgcacttgggcactgtgccggcaagcttgtcagagtcatctggaagatgctcactgacgaagtagaatttaacctcgaataagaggtctgtataccaatatcgatagattttgaaaaagcaccctaa

SEQ ID NO: 1585 - DNA, 315 bp, Unknown
  gut microbiota DNA sequence
cttctttctcatctatgtctatatccgttcctgcaaacaggttgattgcctcgactgtctctctgtccacactgctaaacttgtcatcattatgaagcacttcctgcatcttttctttatcatacgcattctgcaatacttcaaaaagctgcctgatggaggtcctgaatccggtaaagtctgttatctccctcggtgccagcagattaattctgtaatccggtatgaatggcagaagctcctcatccacatcaccaaacatatctgacagcttccttggaccatcccattcctttattccgagatatactgtta

SEQ ID NO: 1586 - DNA, 480 bp, Unknown
  gut microbiota DNA sequence
gccatgtttctttttgaaattctggtcaagataatccacttcaatctctttatatcttgtgcatggtctcacaccatccagcgaaagacagccttcctccgtctgaaaagctcctgattttccggtaatcaccggattaatcatggcaaactggaatggtccggccgcaaccactatgatattctttttcacaccaatcatgttagctgccattccaacacaatggtcaagatttgctctcaatgtgtcaagtaaatccgtaaccacctgtttatcatcttctgtagcatccactgatttctgtgcaagaaacagtggatcacgcattatcttctttaccattatttacttcctgttatacctttcttcttaattttttgttcaaataataaatgcatcttccctgttttccatcatgcggaaatccttcatctccaccgtatccatcgtatggcatataaatatacctcgtttaatatt

SEQ ID NO: 1587 - DNA, 439 bp, Unknown
  gut microbiota DNA sequence
ttcttacaaaattaaccgcccacaacaccgcacagtttaaaagtccccagaagcagccatcaatcagcacaaaaatcagattgtatacaagtggatgtgtataaaatacccctgacatgatatccattgccgctaccgggaatgtgcctgttcctacctgtggtattaccatcggaaataccattgcagtaagcataaagtcaaagaccagtggtatcattccaataagcgcaccgcttacaaatgcagctccatattttgctcttatataatcgctcttctttcctcttgatatgatctgggcagcataccctgatttaacatcaaaataaaagcttctgccatacggtatggcacacaaagcaggcattatcagataaagcagcaacggctgcacacttgcattatccgcacctatccatttctcatatgcagacaa

SEQ ID NO: 1588 - DNA, 3052 bp, Unknown
  gut microbiota DNA sequence
atttccaagtaaagatgagcttttagataaatacgaagctggtcttgattctccatacgaggatttatctgatatcgacaatttatctgacgaggaacaatctacaataattactgagcagaaagcacgcatctcaaacgtatataataagattcagaaagagagggaagcatttatgaaaacagtcggctaatgtagtcttgcacattttctttactaatgttattataaaaatgtgagtgggaacgaaatagcactcactatcccttttttttaaatattttatcaaaaactaaacttcccaaaagccagccgtttgcaaacggctggctttttactgtattcatttaataatctgtactacagtttacgtccgcacataggacaatattcaatctctattccgttaatgaacactggcaaactattaatgcctatgttaatctccagtgtattattatctcttcagttggagagaatctgtttggggaaaaattatgaaattttttaaattgttgcagatataccataaaaccccgtacagattttctattatagacaatctatacggggtttattcgtgaaacaatattctatttccaaacttcttctgcaatttcttttacaagtgcaagttttgcccactgctgttcctctgtgatcttatttccaatctcacaggatgcaaatccacactgtggacttaagcatagacgctcaagcggaatatacttttctgcttcgtgaattcttgcgatcaccttatccttatcttccagttccggtttctttgttgtaataagtccaagtacaactttcttgtccggagacacttttgcaagcggtgcaaaaccaccggatctcgcatcatcatactccaaaagtaatgcgtccacatgctcctgggcaaatacatagtcagctacagaatcatatggtccacttgtaaaaaatgtagagtgataatttccgcgacaaatgtgggaagtaatcaccatatcctccggtcttccttccagtgccagattatttactttcaaaagccgtgcctttacctcttcaatatcaacaccaagtgactggtatctctgctttgcagcatctccgacaattgcaccccaggtacagtcatcaagctgcagattacggcatcctgctgaatagaactgtttgatcacatcctgatatgccttaccgatatcctcgatcaattcatcatctgtcgcataaaattttcttgtctgctcaatgttctgcggaacgatcatctgctgatacatctgcgccggtgccggaatggtatactttgcaacggtctgttcatcttcaaactgctttaagaatttgaaatactctacaaacggatgcacctttgcttttacctttcccaccagataagtagcctcaaggtctgccatctctccgttaaactgtacgccgccaccatctttttcatgggtaactccttcaaatccccacataaaatccagatgccagaattttcttctgaattccccatctgtaatcgcatggtatcctgctactttctgctttgcaacgatctctgtcacgcactcatccgtcacgcggtcgagttcttcctgtgtgattgttccttcttcaaacgctttttttgctgctttaagcttttctggtcttaaaaagcttcctacaaaatcatagcgaaatggtgtctttaatgtactcatatattgataacctcctgtgtttttttgttcgttttctagggttatcctaccatgtcactatgactttgtataatacatttcttttgcggttagtcatagtttgaagctatatccagttatgacaaacatatttaaatgtagtactcttgtaattttggaaatttccgaattcaggtacatcgctacctcattttccaggcgtgccccggatgaagcgataagctctatgatattctcccgcacacttttttgggcatcaatcagccggttataatacgaaattccgccaaacacactaaacaatcttaccttatcttcttctgaaaattcaggataaaacaatgcagagtcatagtagtccatcggtttcaggttcagcgtaaggtcgattctgccatacaacggattctgtctttccattagtgctttcatcgtatcgagagaataccttttgaccatcaaatcagatatcagaattatatttctataaaagttttatattatattatggttttgaattttataaacatacttcttcaatgtatttctgcttatattatacttcctcattaaatccacttgtttgatagacctatcagacaaatatttcaaaatatcctctctgagagcatcagacatcttatcaagctggcctggttttcttccactcttcttattgcttgcagcaattccatctttaatagactgggatatataaaggcgctgcttctctcccctgtccagctccactatgatcagaagcttaataatgctttccatagcagttttggttacaatgtcctgttgctctgccgttgtcatcatttgtcgaatgtagtcgctacttaccgttggattatcaagaaataccatgttaatacctctgtcgagccattccatgtatttcttatagccattttctgcttccctggtaaaacgatacaaatccttgaacacaactgtgtctccgccctgcagcaatttatccaattttttaaattggggtctgtctgtaaaatttttggcagatttttcctctgtaaaatctatcaagtattctatgtcgtggtcttttgcatatctctcaagcgatttaatctgtctgttgaagttttgacgttcagtgtctgttgatatacgcttgtagctgtagtaatttcccatataaatgcctttcgttgtatcaatttaactatagttatatttactttttattatagtgtcagaataactataaatcaatataaaataacatattttaataaacaaattagttgataagtttaaatgacactatatattatagttaaagaacgtatgtttgatatataagtaaaaatgtg

SEQ ID NO: 1589 - DNA, 1737 bp, Unknown
  gut microbiota DNA sequence
gacttaattcttattttgcaatgccatttcataaacatgctcgcattactattgagaatcagcataaaaatccaataccggcttttttatcagattgattactgcctgtatgattcgcttccagaagacacttcttattttcatgctcagttgagaaggcaggcaataactgaaattggaaaagattatgttattcttgataatgtaaaaggaagtggccgttatgtaggtacttatctgggacttttgcttcgatgtacctttatgtgtattaataagcatgtagagagatatagtttctctcttctgcatagttccgtaatgattgctgcttgacagtctccttcaagttcgttataatgataaacgcaaaattttagtggacttttccggattcggtcatctttttgccacacagctatcttgtgatagttgtgtggcttttttgttgcttgtaactcggaagtattagcagaatggaggactataatgttcggacaatttgtggagaagagggaaagcatgcagacaaataacaaaatggcggttgcgccgcgctggcaaccggcatcgggcagaccttgacgcttgcgatttatctggtcgtttattttgtgcggccaattcgcgtgcatatccgcaggcagtacattttgctcagcaaaaagatggtaataaagctgtactccatcggcattcccgcaaccttgaatattgcgctcccatctcttttgatttcggcgctcaatgcaattttggcggcatattccgaagtgtatattctggttttgggaatatattacaaattgcagacattcatctatcttccggctaatggcattgttcaggggatgcgccccttgatcggctataactacggtgcgggggagaataaaagagtcagccagatttataaaatcgtcttgtgcatgagcggtatcattatggtgcttgggacagtgatatgtctgctaatccccggccagcttatggggctgtttacccacacagaagcgacaatccagaccgggaaaacagccctgcgtatcatcggcgccggttttattgtctcggcggtttccgttacatcttccggcgcactggagggacttggaaaaggcattccttcattactgatttcactatgccggtatgttgtggttatcatcccaactgcgtttttactcagcagcattttcggagcggttggcgtctggaatgcgttttggatcacggaagcgattacagcaatcatttctatttgtgtttactacaaggcaatatcacaaagccagcggagccagtcaacagtaaaatgaacgttgctttccccccattggtgaaaatatctttttttgatactgtaataaaaagaacatgtaactattgaatatgggcatgaaaataatatatttattccgcaattgaaataataaaataagatagtataatggaacagaaaggaaggacaaaatgattttgaaagcctggaggtgttaaaatggtaaaaattatatctgacagtacatgtgatctgtcacaggaagttttagaaagatacgatatagatattattccgcttcatattgtaaaaggagatgaagaactggaggacggaccgcagatagacattcatgcattgtatgagtgggctgataaaaataagactacaccaaagacttcagctccatctatagaaacagcaatgaatgtaatgcgaccatatattgatgaagg

SEQ ID NO: 1590 - DNA, 478 bp, Unknown
  gut microbiota DNA sequence
ccgtttttaactaaaggactgatgatcccgttaattcttgcaatatcatcttcgttggacatgataccggttctggcttccgaaacaacatgatgtgcacgctcatgtgcatctgccggatcataaatacgttttaataacgtgcatttcgacagctgactgcagccattacaaacataaggtggcttatttttgacagaacagacatcttctacaaaatcagaacaatgtaaggtgcattcagagcacaggctgcatttgtaagcagattggtgtgtacagcttgttccgcaaatcctttttgctttgcatgtagcacggaatttacaaggattatacggatatccaggacgaccgcttttcttgtcataggaatactttttaatctccttggcaatggttgtacggtcctttcctaactctttgccaattgccccaaaggatgcattctcctgaaggcgttgagcaataatcattc

SEQ ID NO: 1591 - DNA, 396 bp, Unknown
  gut microbiota DNA sequence
taattcaatgcatcataaatcatagttttaacaggcatcgcataatgaatgtctgtctgcgcttctgctccaattaagataacatacatttgccctgtatgcttcacggaaacactttttagcaaatctctccatttctgcttaacaatctgcttcttatcaataccgaaaactgataacacctctgtggtgtcacattcctttaaatcctccggtttgataaccttatctccgtcaaacaatacataattacagatttcactaaacctcgtattgtccgacaaatactcctttgccttcgagtcctttgtacccaaattaacctcctcttcttgtgtgagcaggaaaatctgaagtcgaataaaaatactgtatacttatgctttccacgtatat

SEQ ID NO: 1592 - DNA, 4021 bp, Unknown
  gut microbiota DNA sequence
agcatcatcaacaacggttcctttttttcgcaatttttcaagtcttgcaaatgcagccttcttttccctatttgaatcatcatataatccattgacaccctgcataatctgtatcacaaatgataatttatcttccggtattttttcaagttccattatggcgctctgtctaagtgctgtcattatatatccccctctttccaattaattaatcggttatatccttttatagtatagcggatttttctaaaaaatgcaattactgtaatataatactccaaagcaccccaccgaaccggtggggtgcctcataaaaccaggcttatgacacctgcactctatacatatttttgcggtctatcgctccaatctcttcaagcgtattgatcatacgatacaccgtagcagtcccgatagagtggtctatctttgacgctcggtaataaatttctttgcagcttccgcactcgccctcgaggattacatcaagcaaaataagtctctgctttgtaatcctgcatccgctgtcctttagcttgccaacgattacctctttttgctctattgcttctttcgacatacatcctcctatcgttaccgatgccggcagatgcagcttaagcggcagatgagttctttccatgaaatgcccatcctgtgcttcatacacaccatgccgtggattaatgacagcccttgcaatggctgcagtccattccacactgcaggcttttgcctgctttctttgatttgattattgtcctgattacaagtgcaactatcactacgagaattgcaattacaatgatatcagccagcatgtcatcatctcctattcactacaaatgctactaaatatgctactgcattatttcttttctttgaaaaatcctattataatctttacggcaagccccagcaggcacagaagaactatgactgctatgaggtctgctgtgttaaattccaagttgattctcatttaaatgcctgcctctaaacgcctgctacacgtttgatgctgcaaatgaagagctctttactgttgccttattagggtcttttctgaacaataagtataatacacctgcaaggagtacaaatgcaactactgtccagaagttgaaggctacctcacctatgcaaagtcccacaatctggtagaacataagtgttacacagtaagctgatacgttctggaatatgattgtaaaccagaagaacttacggttgttaagctcttttgctgttgttgagatagctgcaagacatggtgagtcaaacaggttgaacagcaagaatgatactgctaccattgttgttgggaagaatgctgcaaactgatcatgcatgcttactgcatactcttctacctctccaagtcctgagagcacacccattgttgaaacgataccctcttttgccacaaagcctgagagtgatgatgcaactgcctgccatgtatcgaatccaagtggtgcaaagataactgcgattgcagatccgattactgcgagtaagctgttttctgtgtcaacaagtccgaatgcgccatcctggatgccaaagcttgaaaggaaccacataactgcacagcagaggaagaggattgttccggccttcttgaggaatgcccatactctctcccatacgtgtaacagcacaccctttactgaaggtacatgatactgtgggagctccattacaaacggtgcaggctcgcctgcaaatgctcttgtcttctttaaaatgatacagtagatgattgtgaggccgattcctgcaaagtacataagaggtgccatccaccagcagccgtcacccatgataaagcctgcgataagtgcgataacaggaagctttgctccacatgggatatttgttactgtcatcattgtcatacgacggtctttttcgttctcgatagtacgtgttgccatgattccaggtacaccacatcctgatccgatgaggaatgggatgaaagactttcctgagagaccgaatctacggaagattctatccatgatgaaggctactcgtgccatgtatccgcagtcctcaagaattgagaggaataagaatacgatagccatctgtggtgcaaatccgataggtgcaccaagacctccgatgataccttgaactacaagtgatacgagccactcagagcagcctgcattttccataaatgtctgtactgccggctgaatccactcgccgaagagcgtgtcgtttgtccagtctgttactattccaccgagtgatgatactgccacgtaatatacaccccacataatgagtgcgaaaataggcagtgccaaaaatctgtttgtaacaatcttatcaattttgtctgataccgtctcttttcctgcgcgtgccttctttacgcatgagccgatgattgaagatatgtactgatatctctcgtttgtgatgatactctctgtgtcatcatcgtatttgtcctcgagagctttaatctctgtgtctacgtttggagcactctttaatacttctgaaatctttgagtcacgctctaaaagcttgattgcaaagaatctcttctgattctccgctactgcaagaccaagcttatcctcgatgcctgcgattgtactctccacatcgtctgcgaagtgatgtaccctctgaacagatttgcctgactttgctatctcgatagccttctctgccgtctccttgattcctgtcttctttaaagctgaaatctcaacaacctcacagccgagcttttcgccgagtgccttgatattgattgtgtctccgtttttctttacaatgtccatcatattgacagccataagcaccggaatgccaagctcgataatctgtgttgtcagatacagattacgctcgatatttgttccgtccacgatattgataatcgcatcaggctgctctccgattaagtaatttcttgcaacaacctcctcgagagtatatggagaaagtgagtaaatacccggcaaatccaccagatctacatccttgtgaccgataagttttccctcttttttctcaactgtaacaccaggccagttaccaacatactggttggcacctgttaaggcattgaacagtgttgtttttccgcagttcgggtttcctgcgagagcaatttttactgccatgttttaatctccttatttttgtttgctcattctgtctatagttcgcatccgctaacctataaacaaaaaaatttactctacttctatcatagaggcatcgtccttacgaagcgatagctcatagcctctcactgtcacctctaccggatcgccaagcggtgccaccttgcggataaatatctcaacacccttagtaattcccatatccatgatacgtctcttgactgcaccctggcctgtgagcttgacaaccttgactgtctcgcctactttggcttgctttaatgtcttcatgctgactactccttttttaattttattgttgtttaaaaaaaatatataaacgtttgcataatatcatatacaaaatcgtttaaatcttaaatgattacagcttatacagcgcattgctgcatgtgttatatgtgttatatgtgtcatacatgctatatccatgcctattacatgtgttatatcagaccatgatcttatttgccatgtccttgccgattgctactctggcgccctttacatttactatcatattgccggctatctctgagatgacagtcacctctccgcctactacaaagcccagcttctcaaggaaggatctcacctcttcctttccgccgattttcttgattatctgtgcctccccggcaccactcattgataatggcatcatatttacctcttttcacgtcttttcttcacgtctttaatgataaaaaacatcatttggtatctcttacggctgttagtatactctaacgcaacttagatgtcaataatattttttagatttttcttacttttttcagttgtggctaatatggcgggtcccaagactcggtaccatc

SEQ ID NO: 1593 - DNA, 1108 bp, Unknown
  gut microbiota DNA sequence
tatgtagcatcctgctctgtatcagccttgattccctttactccaagtcctgcagagttcattgagtcgatgttgactgtaatcttgtttgtcatgtcagcatcagcacctacgtggaggttgaagcttaaggcatctttgtatgaaacagttcccttattaagagtgaattttgtagttgctgtattatatgcatcgtttactgttgttgcatttttagctgctgtatcagttccaatactgcttgccttaactatctcagctgtctgtaactgatatgcttttgttgcagtaataactgttgagtcattatcatcaataccatctgcttttttatcatcaattgttgtaacagatttaaatcctactgaaatagttgcaccctttacagctgcaaacgcagctgcatctgcataatcagctactacagcctgagtcttattgtttaatgttgatggatcattagaataccaacctgcggcagttcccttcgttccggcagtggtatctgcatcaattttatcataccatttataggttgttccattcactgtaacatcattgtgattagttgcaatatcagcacctttatcacctaacatagatgtaacatctgcggctactccacctatagtaaaattcttaccagcaatacttatcttatcaccggcattgagtgtctttaatgtaacctctacttcattacccttatctgtaagcgtaacaccatcaagtcctgcgtcatgtgcatttacattatgagctttctcagctccatcaccctttaagagatatgtctcattgaactttgttgtctctgatacacggtcaatctctgttgtaagctgatcaatctcgtcctggattgctttacggtctgtgttagagtttgttccgtttgcagactgtgtagcaagctcgttcatacgctggagcatagagtgaacctctgtgagggcaccttctgctgtctgtactgcagaaacgccatcctctgcatttgttgaagctctgtcaagacccttgatctgctttctcatcttctcagaaattgtaagtccggctgcatcatctgctgcacggttaattctgtaacctgatgaaagct

SEQ ID NO: 1594 - DNA, 374 bp, Unknown
  gut microbiota DNA sequence
tgtaagagtaacgccatcaagtcctgcatcatgtgcatttacattgtgagccttctctgctccatcaccctttaagagatatgtctcattgaattttgttgtctctgatacacggtcaatctctgttgtaagctggtcaatctcatcctggattgctttacgatctgtgttagagtttgttccgtttgcagactgtgttgcaagctcattcatacgctgaagcattgagtgaacctctgtgagggcaccttctgctgtctgtactgcagaaacgccatcctctgcgtttgttgaagctctgtcaagtcccttgatctgctttctcatcttctcagaaattgtaagtcctgctgcatcatctgctgcacggttga

SEQ ID NO: 1595 - DNA, 3725 bp, Unknown
  gut microbiota DNA sequence
cagactgtgttgcaagctcgttcatacgctggagcattgagtgaacctctgtgagggcaccttctgctgtctgtactgctgatacaccatcctgagcatttgttgaagctctgtcaagtcccttgatctgctttctcatcttctcagaaattgtaagtcctgctgcatcatctgctgcacggttgattctgtaacctgatgaaagcttctctgcgctctttgactgtgcgcttgttgttacgttgagcattctgttggcatttgctgcctgcatgttgtgttgtactaccataatataatcctccttgtcccatattcatgggttattatgtttgacctctggaaatccttttcccgagggttttgcagctgctttgtgcttatttttatttaagcagttgcggttttctataacaagcggcttcccgggtgtggcagatgccacggccgcctattaacatgattagttgctttgcgtctttttctgacgcgctttttccttccaaatgatgcgctgtatttctttttgtgcctcattggaaatctcagggtcgggataatatgtatcttttcgcttcgccgggtccggttcgttgttggatcttgcgatattcagttcttttggggcatctatcagtaatcgacagtgctttccggttccacccgcgaacacgattcggatatcgtctccgatgttcacatattgcccttcctttaatgataatttgagcattttctacctccatgcactagggaatagctttatccatgcttttccgaataatgtaacattttgtagtaaaatgttgcattttttgtggattgataatgggtcaaaaaagaagtggattaaaaaacatcaaatgtatacgccaatttagtcatttttcatcaagaattactttatctttgatacagatatgattaaatccggtaagactaacaaaaaaaatgatagaaaaatgaaaagaaaattattgaaaaaattatttttcaggggttaagttctgaaaatggcgtccgatatagtaggtgtaaagcaaaaaatgcaacattttactacaaaatgttgcattttttctattttgaacttaccattattgtgttgtggattttggatattctgagggtgaaagtctgtcatattgtacgtgccggataacattttctactataaaggagtattcaatgggaactacacagccaatccgaaacaaggacgaactcacggctttcaggatgtactataaggacatccgtccaaacagccgcaattactgtttaattgtgatgggattaaacacagcactaagaatcagtgacctgcttagattaaagtgggacaacgtttacaatttcaaacatcatgaatttcgcactcattttcttatcaatgagcaaaagaccggcaagaataactatgtcactctaaactacaatgccaccgatgctctgaaagattatttcaatgaacgtaatccaaatgaccatgaatttatttttaccaagaatacctgcagataccagcctataagcaggacgcaggcatatcgtattgtaaagactgctgccggcaaaacagtgcaggatgagcacatcagctgtcattcgcttagaaagacgtttggctatcacgcctggaaaaatggcacgcctcccgctctgctcatggatgtctataatcactcatcatatgagattacccagcattatctgggaatcgaacaggatgagagggatgagatttatctgaagcttgaattatagagcctgtaaagctttgcaaattatacaatataaaggtcttctatgattcaatattaaattatagaataccttttattccgccggccatgattttctgagagccacataggaaatcaggaaattggcaagccagccggccggtacagcaagccagacaaatgcaataccgaaacgcggtgcgcagattaaggcaaccgagaggcggattgcaaggtttaccatatttgcagcaagaaacggacgcatgatgccaagtccacgaagcacaccatcggtggccatcttgatacccatgaaaatgaaaaagcagccgagccatctcatataatcccctgatacctgatatgccagggccgttccgtctttgcccaggaataatgaggaaatctgagtatgcagtgcttcaattactataaaagcaagcactgcaaaacacaggtctaacaccagcgcagcgtgatagccttttttgatacgttctgtcttctttgctccgagattctgggaaacaaacggagaaactgcatttccaatagatacaaatatcagtgaaaatacattctctaccctcatcgttgccgaatatcctgcaagcgcctgtgtaccgaacggattcacaactgcctgtactatcatcatgccaattgacaccgtagactgctggagaaccgaaggcacagcaatccgaagcatggaatgaagctcatgcctgtcaaaccattcaaagcgacttttataccggcgcatacggctaaggaaaatcaaaagtgaaaacactgcagatattccctgagcaattagagttgcaagagcagcaccgaacactcccaggtcaaggcctgccaccatccaaaggtccataaatatatttaacacagaggaaaatatcaaaagccccaacggaatccttgactcgccaatcgatgtaaacatcgttgaaagtatgttgtacataaacaaaaagggaaatcccacaaaataaaccctaagatacagcactgcctcatccagtatatctgcaggtgtctgtagcaagctcatcattgaatgtgaaaagaaaaagccaaagacacccagaagtacgcttaaaaccagaaaactaatcagtgatgttgatactattgttttcattttgccgtaatccctggcgccgaaatagcggctcacaagcacaccggctcctacaccggctcccagtgctatacagatgaacacattcgtaagcgcagcacaggctccaactgccgcaagtgcagaggagcctacaaactggccaacgatgattgaatcagccatattatatacttgttgaaaaaagctacccaaaatcataggcattgcaaaaactgtcaacgcctttaacggggcatctgtaattaaatattcatcttttgacattatttttccctcattccgctataattaagctatagtatatccgattgagaggcaaattacaatatagcattctttatcgacatttttccatttcttatgctttccctctaatgcaaacatcatactgctcctttgtattttaatttaaaaagccgcacaggcctatggcctgtgcgacttctcataacatgatttaaattaagtttatccttcaatagcaatatgctttgtggtctcaactttcttttgctccttcttcggaactgaaagtttaagaataccgtcctgatactttgccttgatatcttcctgtttcagctcatcgcctacatagaaagacctgctcatagcaccggaatagcgctccttacggatgtacttgccatccttttcatccttctcttccttgtcaagtcctttagctgcgctgatagttaagtaaccattctccagcttagcttctatttcgtctttcttgaatcccggaagatctatatctacttcgtaactattgtcagtttccttgacatcagtcttcataacgttctttgcatgtttac

SEQ ID NO: 1596 - DNA, 140 bp, Unknown
  gut microbiota DNA sequence
gcggatgtacttgccatccttttcatccttctcttccttgtcaagtcctttggctgcgctgatagttaagtaaccattctccagcttagcctcaatctcatccttcttgaatcccggaagatctatatctacttcgtagc

SEQ ID NO: 1597 - DNA, 1196 bp, Unknown
  gut microbiota DNA sequence
atcctcatactttgccttgatatcttcctgcttcagctcatcacctacatagaaagacctgctcatagcaccggaataacgctctttgcggatatacttgccattcttttcttccttttcttccttgtcaagtcctttagctgcgctgatagttaagtaaccattctccagcttagcctcaatctcatccttcttgaatcccggaagatctatatctacttcgtagctattgtctgtttccttgacatcagtcttcataacgttctttgcgtgtttaccataaagcaccttgtcaacatcaggaaatgaaaaatccatccaatcatcgttaaataagttttctccaaaaatactaggcatcaacataagtcatctctccttcttaatctataaaatctgtgtcaacctgtttctttggaaccgggatgtttcaagaactcaaagcctttgctttttgttcctttcctttgttcttgactatgttatacacctattattagcactcgtcaatagtgagtgctaataatttataaaatgtttatattttccgagcagcttcaaagtacttactatatggaactccattattttgcaataaataacactccgagtgtgccaggcccacaatgtgatgaaatcacaccacctgctcttgtctctattatttccttaaaaatgccaagagaggctatgtaatctctcacctcttcaactgtcttagcatcacattccgaatgtgtaataaatacccgatccggtattgcgtttttcaggtcctcttccagatcttttgcataattctttatgactttaccgatcttacctctatatttcctgcttgcatccattttaccatcctttacaacgatcatgggatgaagcgccaatgctcctcctataagcgcagaaacagcattgcatctgccacctctgtaaaggtacacaagtgtatctacaacaaagcttgctcttaccttcgggatcaattcatcaattccggcttttatctcctcacgggatttaccatccgctgccataactgccgcctcaacaacaagcaggcctattcctgtggacagatttcttgaatctatcaccgtaactttatcttccgcatcaagttcttctgccgccattctgatcacattgattgatgtcgacatctcacttgatatggaaaagcatatgatctccct

SEQ ID NO: 1598 - DNA, 363 bp, Unknown
  gut microbiota DNA sequence
gttatataattgttttctgtcagtcccagtgtattatctacctcaaagtcttccagatggattcggctgattgtttctgtagcatttttcttgaaatctttctttaaaggctgatccagcttatcatccacgtaacaatttaagacatcaatataacggtgaagggttccatgcccctctaaaagcctgtcaatatcctttttcctagatgtatagtcaattcccaggtcaatttcatctaaaatggtatcacaggtctgcagtgcctcgtccacatccatcattgtatcatacacatacatacaatttaaatagcttacacctttttcactccaatccatgtatgctttttttatttcttct

SEQ ID NO: 1599 - DNA, 1923 bp, Unknown
  gut microbiota DNA sequence
tagtatccgaagcccaggagctttgaatctgctgtcttttctccgtaatctatcaactcatggcaatatctgattgtgagctcggcgtcctttctgtaattgtcaagaatgccatttgtccagtttttcacactctcattgtattcgttaaactccacttttcacctctatatatctccgaaatagtccataggattgaccggttttccatcctgttccatagcaaaatacacattggttccctcaacagtatagtatctggtcacctttccaactgttccaagtgtttctcctgcctcaagtacatcgccctcactgcaggttagatttgcaagctgtccgtaagtagccgtatagccgtctcctaaatcctgcactactgtacagcctgtctctgcgctgtcatatatgtctataatcctgccctcggtgactgagcataccgcatctccttcgtttgcacgtattaccatgccacgattatactgatactggtcgagtgtcgggaaataaaccgtcttgtccatggaaaacggcaaaagcacatctccctttacaggccagtttgtcacattttccgggacaaaatgcagttgtttttccgtgggctgctgattttcctgctgccctgcagctgattcttcctgtcccatttttgtctctgagtctactttttctgtagttttctgtggtgtctttttctctgtaggctcaactatagacgaagtctgtgaaatttctgttggtatctcgtctttcccgggtttctgtgttgaatataccgctgcaaatcctatggctccggccacgagacatgccgctgctgcaatttgttgttttttcataggacattacctccatcatctgaattgttctgatgatagtatgtcctgtctgcatggatttattcatgctttttctattttgcggcaccaattatatttgataattgcgcaaactgtgcgaggcttagagcctcaccacgcacatttacaggaactccgagagcctctatgctctgctgtatctgctccttggtcagtcccataccaccgaaattgttgagcccgttggcaagagttttcctgcgctggttgaaagatgccctgatgattttgaacatcagcttttcatcatctacgtcaaccaccggcttttcgtatcgcttgagcgatataacagagcttcctacctttggctgtggcatgaaacagcttggcggcacatttaccactatctcagggtgcgaataatactgcaccgcaagtgacagagctccgtaatccttcttgccgggacctgcctgcatacggtctgcgacctccttctgcaccataattgtaatactgtctatcggcacatgactctcgaacagccccataataataggtgtcgttatgtaatatggcaggtttgcaacaacctttatcggcttaccattattatattcttctgccagagcatttatgtctacctttaatatatcatcatttatgacctttacattatcatattcactcagagtatccttaagtataggtatcagatttgtatctatctcgactgctattacctggcgcgccgactcacacagatactgtgtcatcgtacctattcccgggcctatctcaagtatcatatcgtcctttgtgatgccggccgagtctatgatttcctccaaaatgcctgtatcaataaggaagttctgtccgaatttcttttgaaaattgaaattgtatttctgcagaacctcgattgtgttcttaggatttcccaaatatgccatggtatgcgctccttgtgtcgtttcatctgatgcgacagtacaactgctgtctttattttttatattatcacatgaaatgcctttatttcaattatattcgtgaattttcgcggttcatgcttttcgtccctcatgtt

SEQ ID NO: 1600 - DNA, 333 bp, Unknown
  gut microbiota DNA sequence
ttgcagacaatgccaggtttgctgacctgtgcaacaatatactgtatggaggaagagaggtcatcctgccggaaaaccttaaggaaagagacacgacagaggtgctgaccgcactggggcttgataaaaagaccatagcggtgcagaagcttagggacatcttcaaaaatgccagcatcaaatataccggcaaatcatacgttgtcctgataggagtagaaaatcagtcggatatacactattccattccggtaaaaaacatgttttatgatgtcatggcatatggcaatcaggtaaaggaaacagccaaaaagcaccgcagggaaaaggata

SEQ ID NO: 1601 - DNA, 247 bp, Unknown
  gut microbiota DNA sequence
tgtatgttatcttaattggagcagaagcgcagacagacattcattatgcgatgcctgttaaaactatgatttatgatgcattgaattacggagagcaggtcaacgaggcaaagaaacgccaccggaaaaataaggattacaggtcttcggacgagtttttgtcaggctttacacttgatgataagctgacaccggtgattacaatcacactgtatcttggaactacacagtgggatgggccaagaag

SEQ ID NO: 1602 - DNA, 638 bp, Unknown
  gut microbiota DNA sequence
aatttgatgcataatttaatgtatttggttaataaatggggttaaaaagtgtgtaaaagaccataaaagactataaatgatgtctgtataaatttagtaaaaaatgaggagtacaaagagatgaaaaaagaaaacaattatatatccactgatatgaatcataaaaagctaatagttggagtcgtaataattcatgtttgttttatgctcataggagctagtggtattatttctactttaaaagaaaaaaatatattttatgggctgctgataaatatgatttatcagttgactttgattatcatgattggagtggcaatgaagcaatatttgatcacttcatttaaaaaattcaaagctgaccgaatttctgtaaatataaaaagagttttggcaggtgtgggaattgcattcttgttaagctgcatcgctggaatcattgaaatgacagtgtgttcaaatacatcggtttcggcaaatcagtcaaacgttagtggatattttgtggattatcctattttggctgttatcatgagtgtaattatgggaccttttaccgaagagataatttatagaggtatattgtttcggtttttcagcaaatatggagaactgtgtgtagtattggtgacaggatt

SEQ ID NO: 1603 - DNA, 288 bp, Unknown
  gut microbiota DNA sequence
cagtaggaagcggaacagcagtattcggagctgcagatgccatagagggcactcaggatatttattatggaagcacaggtgacattgacagcacggcagtaaacggtataaaggatggcctgtttcagggaaacgaggacgcatattatctgacagaaaatgcctttgcatttgcggcatccgcgatgattccaatcggtcaggcatctacagcgggaaatctgacattcaaaagcacagcaacaatagtcgccaaagaaggcatctcaatgggagccggagccggtg

SEQ ID NO: 1604 - DNA, 252 bp, Unknown
  gut microbiota DNA sequence
cagccgaatccatctggaagactttgaggtagataatacactgggactgacagaaaacaattatataaccggcggaatgggatatgccggaaccatggtagaacaggaaaaagcaaagctgacttttgcagattttattggaacttctgacggaaaggcggatggaaatgggcttcatatatcgtataccaatggaagtgtagaagattttgcaagtatttttgcagcacagtatgaggcaatgaaagcatc

SEQ ID NO: 1605 - DNA, 906 bp, Unknown
  gut microbiota DNA sequence
aaatgtaactatacattcttgcccatttcatatactttatttaaaatatcatgcatatttttcacatcatcagtttttcttgtgtcatacgcaaatataataccgtcctcttcacttccattttctccaaagcatgaaatatactgtctgaaacatttaatcatggtttgtacatttatttcttttcttgtagctgcagcacctaataaatagaaaatcttcttatccatactatcttcaattgcaaaagttctgtcaatcattcttttcatcaaagagggccaggtataaaagtaaaccggacatgctaaaacaattacatctgctttatacatttcatcatatatttcattcatatcatcgtcttgaacacattttcctccattttgttggcaaatagcacaaccactacaatctattattgttttatccttcaatacaatttccgttacagcattatgattttcaattgcgcctttggcaaatatatcagccattgttgcagtatttccttttgtccttggacttcctttaattattaaaacatttttattcatataaattatgtcactttctatatcctttatttaaatttttagtcagtctaattattaaaacttagctttctcatattcactcattatatcatttaaatgtttcacgtgaaacattcctattatatcatttaatactttatatttgtcactaaatattgtatttgatatatactatcatatatttccgaattacataataattgagattataccccatcatataatttaaaacacaaaatattaacctatacaatataaaatcatacattattcatttttaaaataatatactatatgacatttattatacatccaacacgtagtgaatccgacatacatatatatttca

SEQ ID NO: 1606 - DNA, 376 bp, Unknown
  gut microbiota DNA sequence
aggtggtgcatggttgtcgtcagctcgtgtcgtgagatgttgggttaagtcccgcaacgagcgcaacccttatcctcagtagccagcaggtaaagctgggcactctgtggagactgccagggataacctggaggaaggtggggatgacgtcaaatcatcatgccccttatgatctgggctacacacgtgctacaatggcgtaaacaaagggaggcaaagccgcgaggtggagcaaatcccaaaaataacgtctcagttcggactgcagtctgcaactcgactgcacgaagctggaatcgctagtaatcgcgaatcagaatgtcgcggtgaatacgttcccgggtcttgtacacaccgcccgtcacaccatgggagt

SEQ ID NO: 1607 - DNA, 1539 bp, Unknown
  gut microbiota DNA sequence
aggaaaaagaaccattaaactaaaggctttaaaacagctgattcgtcagcaagtctattaattataaagttgtaaactggtgtattataccataatgatactattatgaaatgaacccccagtagtgccagctgctgggggttcttctctttttgttcggttgagcatccgattaggctaataaagggcatgaatgatttttgtttactttcctttatgaatgggcagccagtgttgccagcttctgcataattgcacttacatcctgcattacattcaaattttcttcctctgcctgcatcgtctcgcctgcgtgcgccgatacctgctgggaaatcgctgagattgtctgaatggaatctataatttccttatttgcattctgcaactcggaaatgcttcttgaaagagtatctgcatttttctgaattgcacgcgtactgtcctcgatactttcaaagctttcttctgcatttgatgcaccagtcttctcttcgttaattccatctatcatattggagacaacaccgaccacctccatgattgcattggacacgttgctgatcaactctgtaatatgtacggttgcttctttggttctcgttgccataccggaaatttctgttgcaacgacagaaaatcctcttcctgcttctccggcacgggctgcttcaatgctcgcattcaatgcaagaagacttgtttggttcgtaattcctccaatcagttctacaatggaattcatttcatccatatactggttcagattttccagtttttctgtaacctcggttccattatcaacagaagcttcaacttccgatgccaggtgctcgatatcctgtttgccttccgctaacgctttcagagtaagtgtcatgctgtttccgatttcttccacagcggttgcaacttcatccaccttatcctgaattgcatgtgtctgttccaactgattctgcacatgttctgcggtatcagtagcacctgcagatacttcctgcattgcctcagtcgttgtcttagatgccgctgtcagcttttcgaaacgtacattgatatctgcaatattgccagaaagctgctgatcaagttcctcatttctttccagaagattttcagcctctgcttttgcctgcgccacttctgtaaatctctttcttgtgttttcgcgaatcacttttgtagtcaaaacagaattcgctccaaccataatcataacaacaatctgtacaactgctgcttcgattccatgatacccaaaaccgccttttgtcgcaccgatcacaacaacaatgatactctctaatatggtacctgtattaatcagaagaagataacgtgtgtcactgtaagtggtgacaacaaaaatcatcggaattacaaatacataaatcagatttgtcggtgaggtaaaaagacatattgtgtaaaacaatgaaaatccataggaaaccagatgtttgatcatcgcatgttccgtattacttttccaacaaatcacctcgccaatcaaaggtatgacaccaacgaccgtag

SEQ ID NO: 1608 - DNA, 538 bp, Unknown
  gut microbiota DNA sequence
agagaggttttagatatatgattagagtgcttttcatctgccatggcaacatctgccgcagcaccatggctcaaagcatcttcacccatctggtccacagacagcacctcgatgctgttttcgagatagattcagctgcgaccagccgtgaggaaataggcaatccgccgcactatggtaccaaaaacaaactatacgaggagcatattcctcttattccacaccgcgcgagacagatgacacgcgatgattatttgtactatgaccttctgattggaatggacactgcaaatatcaggaatatgacaaggattgcaggtggcagtgacagtcagcagaagatatttaagatgctgtcatttgctgattacgggacaaatcataagcttacagcagcgcgcgatgttgcagatccatggtatacaggagattttgatgcgacctttgatgatgtcataagtggatgccggggcttgttagaatacataaaagaggtgtataatctatagttgcgcagcagcgaatacaaatacactat

SEQ ID NO: 1609 - DNA, 24703 bp, Unknown
  gut microbiota DNA sequence
agactggataaagaaatccgtacatacgattttttggacaagctgggaatcgaatatcagaggatagaccacgaggcggcatttacgatggaggtttgtgaggagattgacaagacactcggcgcaacaatctgcaagaatctttttctgtgcaatcgccagaaaactgatttttatctgctcatgataccgagagataagacctttaagacaaaagaactttctcaccagataggcagcgcgaggctttcatttgcaagtcctgatgatatggaaaaatatctggatatcacacccggctcagtcagtgtgatgggactgatgaacgaccatgacaatgcggtcagacttctggtggatgaggatgtgctaaaaggtgagtgggttggatgtcatccatgcataaatacctccagcctcaggataaagacaaaggacatgtttggcccggtgataaaggccatgcaccatgatatgacagtggtaaaattaacaggtgaagcatagtaaagcctgacagaacgtaaggagaaccaatggtaaaagcagtaatatttgacatggacggaacactcatagatacggagaaatattatcgtattttctggccgatggcacttaagcaattcggctacgagatgacggatgagcaggcgctttcaatgcgaagcctcgggcagccgtatgcaccgcagcatcttaaggatatgtttcatgatccggatatggattataataaaataagggcataccgtcgcaaaatcatggaggagcatctggaaaaggtggggattgagcttaagcccggtgcaatcgagatacttacatatttgaaggaaaaaggtattcacagagcgatttccacagcaaatgatatagaaagagctgagaaatatttaaaaaagatagggttctacggatattttgacaagatcatctgtgcacctatggtggagcatggaaagccggcacctgatgtgtatgagtttgcatgcagcgagctcaagctggcacctgaggagtgcatggcggtagaggattcgccaaatggtgtcaaaagtgcatattctgcaggctgtaaggttgtcatggtgccggatttgacacagcctgatgaggagctgaaaaagatgctttttgcctgtgttgacaggatagatgagattaaaagtatagtataatcacagcatatataagtcgtggaggcatgatgggcacagaaaatgatttaccgggaatttcattaaaagacgagcagagacagcttcaaaatatcatagggattgcacaggataatctggaccgtgcaaaggaatctgtaaaaaagctgacagatgatttagaggatttaagagatgtctacgaggcacaggacaaagaggggcttgctctgtggaacaatgcgacagcgcagcttcatgagaacgagagaaatattgtaagatgtgaaaaggcgcggaaaaagccgtattttggcagaatagattttaaggatccgcgtcagaagtcacaggagtcctactatataggcagagtcggtattgcaaagaatgcatcagagcctgtggtcattgactggagagcaccgattgcatccgtatattatgagagcagtcttggaccatgtaagtacacggtgagctcagagggtacttttgagattgacttaaacagaaagcgcacatatgagattgcagaggataagctcatcgacttttttgattcagatgtcgtagcaaatgatgagcttctgacaaagtatctggctaagaataaaaaggcagtgctcggagagattatcgcgacaatccaaaaggagcaaaaccttattatccgccgttcgccaaagacgaatatcattgtgcagggagttgcaggctcaggaaagacaacggttgcaatgcacaggatatcgtatattttatataattatgctgatgatttcagaccggaggatttctacattataggcagtaaccacattttgttgaactatattacaagcgtgcttccggagcttgatgtgtacggcataaaacagatgactatggagcagctttttacaaggcttttgtacgaggattgggatgacaaaaagtacagcatacatgaagttagcaaaaatgacagtagaaacagcataaagggcagtaaagaatggtttgaagctcttgaaaaattctgtttagattacgaggaaaagtgtattccaagagatgaggtctacatggaaaaaacaggcaatctgcttgcgggaaaggtgctgatagacacttatctgcatgataatccgcttctttccatgcagagtaaaatcctcatgttaaatgagataatttactcgaagtatgaaaatgaggttctcggtaaggaagtgaagttccctgcaaaggagcgcagaaagcttgataaaaaatacaaaacctatttcggtaaggatgactggaaaggctctgtgtatgatttttacagggattttctgcttagtcagaaggaatatgatatagatattccaaaggactcatttgatgtgtatgatctggcagcgcttgcgtatatttataagcgcatcaaggagacagatccggttcgtgaggcgagtcatgtggttattgatgaggcacaggattttggcatgatggcatactgctgtctgcattactgcctcagaaactgcacatacactatcatgggcgatacctcgcagaatatacattttgagtatggcttaaatgactgggaggacttgaaaaagctgatactcacaggcacatatgatgcattcggtctgcttcgaaagagctacagaaacactgttgagatttcagaatttgcaacagagatactgcgccatggagattttgcaatctatccggtggagcctattatcaggcatggaaacgcagtgcgcatagaggagtatgacaatgtgcgctcactgatttcggcatcggttgacacgataaaaggctggcagagtgaaggctatgagacgattgctgtcgtgtgccgtgatgaggcagaggctctcaaggtgtctgctgagcttaaaaaacatatagaaatagcagatgatgatattgaaactgcacagtttggtgcaggagtcatggtacttccggtcgcgtatacaaagggacttgagtttgatgctgtattgctgtttgacccatcagagagaaaatatccggctgatgatagtcatgtgaagcttttgtacgttgcggctacccgtgcacttcatgagcttgctgtattccaccggggcaggctgacaccgcttattgcagaccctgctccttccaacaggcatcagaaggagttttctgcagagccgcttactaaggcaaaggaatatgaaaagcagcaactgacagaaaaagagatagaagagcaaaagcgtgttgatggcagacgcgatatggatgaaagagagtattttggtccatcgcgcattgtattaaagcctgagcagttgacaaagtcggatgataataataagaagaagcttgatttatctgcatttgtaaaaaaagacagggaaaatcaaacacaatgtactgctacagatatggcaaataaaattaagattaaggaagtaagtaaggctgtaaaaaagagcagcctccctctcaatccctccccatacgcatacggctcaatcccggacaacgatatacttcatgtaaagggacattcaaagggcaagtttgcggtaaaatggctcaaaaaaggtaaatcgcatgttgaaatcgccacagcggacggcacactttatgtgataccaataacacctgagatagtacgcgtaatctttgtaaaaggaattggagcaaagccgcacaaaacctattggaagcaaaaggccgatacagccttcaaatgggtggcaaaggaatccaaatcgcttattgaaattcaaacggagaagctgatattaaggatagaaaagaaaaacggagccatacagtattttgatgccggtagaaatctccttgtaagtgaaaatgccacagagccaaggcttttaaataatggcgagtgctacacattttttgactgggataaatcggaaaagctcaaatccaagggaatacttgcgacagaccttactgatttgacaaacaaagccagatatatttcgttcggaggcagacagcagaggctgccgcttgtcgtgtcaaacaagggatatggaatcgctactgcatcaagccgcacagcactcttttgcaatataaagatgtacggacagtatatctttatagacggtgacactcaaagcgactattattttataggtgcaggcagtgtgggccatacacttgagctgtacggcacattataaaatgcaagttgcccaaagcaaaattatctgataaaatatcggcatgagtataaacggaggataacagatgaaatataggacagaaaacgagtttacacatttcaaattttcggatgtgcatgtgagcgatatcatgatgagctttggcaccttcaaaatatgccttgacaacgtaatcataaaggcagataattctaaaaacagagatatccgtgatatgaggacaaacggccttatattaaagctttcagatgcaaatattatttcattcatacgcgagggctttaagacatatgatgccgatggcaacctaaagagcaccacggctgacgaggagatagatgaggcagattatatcgacaccttcaacaattttcttgacggatacgcatatttaatcgagaaggagaatgaaaactataccttcgtattcgacggaactgatgagcgctcgtacaccttgattgtatcggcatcaaaggacgagtgcgagtgggacagatttatgaatattgaggcatagagtatgccatggtgcatttttagacaagtccaagatgcaccatggcatttttaagcccatcctctttgatatcgtctgtcactatatcggcaacagccttgacttcatcgctggaattgcccatggcaacaccgacatcacagtagcgcagcatatcaaaatcattctggccatcgccaaagcctattgtatcagcctggctcatgtgaagaaactctaccacatcacgtatgccggttgccttgttgacaccgcgcaatgtaatctcaccgctgtaaggttcaggctctttaaagctgctcagggttacaacaaattcatcaccgaggagtcttcttaaatcatcaatgtggtagtcgcaattgcagtaaatagtgctttcaacatcagcgtatcggttagaaaagcttgataattcatcatcaatcacgatatccttaaatgtcgggttgtcctgtatcacatgcatgtcaaactgctttgagaatgctgatatgaatttgtcggcccacttgtggttggtgatgcttttatcctttgtctggaagataagtcctgtgttgttgtcaccaacagtgtcaagaaccttctgtaacagattctgcccatagacatgatgtgcaattaccttatcacccacagtgacatagccgccggcagcagccaccactccgtcaaaatcaaaggcttttaatgatggataaatctgattgtagctacgtccggtgcaaagaaaaatcatatgaccgttttgttttgctcttattagagcatcagcggttgatgggctcatggtgcttttgccgaaatcaacgagagtgccgtctatatcaaaaaataatagttttttcataagtgttacctgcctcattattattaattacatataccagatatactctacaatacgaattcaataaaggcaatagggaatgacctaaatttatttaataattgttgcaaaagaaggctctgttataaccacaattaagaaaaactataatatattcctatactttattttcttaagttttgactatgatgggttgaaataataagtttattgtgttataacgttaaacaacaaaaaaacaataaatgcgttgaaggagacttggatcaccagacaccgacaggaatacagcgtcaccgactgagagcgctgtttggaagagctgattgcaggaacactaccggagcagatctgttgaacgattgatatggtttattgcatagataggtttatcgtatgtgaattaagctttttatatatcaaaagtaggcagatacgattcatccacgttacggataagagtggagaaacaggtacagtcctttttctcaaagcgggtggtaccgcggaatatttttagaattttcgccccggagcatttcattaatctgatatgctccggggccttttttccgtcccgcttaaaaaatcaaaggagcacaaaaatatggaattcttaacaggagcagttcaaaaggaagacctcggtatcgcagaaattcttgcaggcgactacgagggcaaaaacatcaaagtaaagggtgcgattcacaccataagagatatgggtgaggttgcattcatcgtcttaagacgcagggacggacttatacagtgtgtatacgagccgggcaaatcccagtttagcgtcgatgatctaaaggaagcagataccgtggaggtatgcggcacatacaagagtgatgaccgttctccaaacggcttcgagcttcgtcttgacactatcacaattttatctgagccggcggagcctatgccgcttcagatcaacaaatggaaactgaatacttcgcttgaggcaaagctcaataacagggcagtggcactcagaaatccaagagagcgcgctacgttccgtatacaggagggtatcacaaggggctttagggatttcctttataataatggatttacagagattcatacgccaaagcttggcgcaaagtcagccgagggaggcgccaacctcttcaagcttgaatatttccacagaccggctatattacagcagagcccgcagttttacaagcagatgatggtaggtgtctttgacagggtatttgagactgcacctgttttcagagcagaaaagcacaatacaaagagacatctgaatgagtatacatcactcgatttcgagatgggctacattgacggcttcgaggatatcatggagatggagaccggctttttgcagtacaccatggagcttttaaagacctcatacgccaaggagcttgagcttttaaagattaagctgcctgatgtggcaagcataccaagagtcagatttgacgaggcaaagcagcgtgtcgcagaaaaatataacagacaattcagaaacccattcgacttagagccggaggaggaggtacttatcggacagtacttcaaggaagagtatggcagtgattttgtatttgtcacacattatccttcaaagaagagaccgttctatgccatggatgatccggcagacgagacatacaccttaagctttgacctgctcttcagaggccttgaaatcacaacaggcggccagcgaatccacgactacaacaagcttatggaaaaaatcgcaaagcgtggcatggagacagagggtatggagagctatctttcagcctttaagtacggcatgccgccacatggaggtcttggaataggacttgagagacttacaatgcagcttatcggagaggataatgtgcgtgaggctacactgtttcctcgtgatctcagcagattggagccataggtcacagcttctggagttgtggcgggtgcgcatgcaggctgtgtggtagcatgtgtgtatatattttgctcagaaaatttttaagcttgttccgacatttcctgcggataggttattgtcaggatgtatgctgagaggtattacaggctgtgagagtcggaactgttaaaaatttgtcttcacaatatatatgcacccatgcgttgcagggtgttgatgcgcacccggatgcaagttttggcagtcccagatatgcaggattcaattatggcgggtgcgctttaaggcttagaagtggcatgtgtgtataatcccaagtagaaattaaaatatcaggaaagagagaaaggatatcgtatgaatcatataggaacaagagaaatcgccacagagcggcttactcttcgaagatttgaaatagaagatgccgagaacatgttttacaactgggcgaatgacccggaagtgacaaaatatcttacatggccggcgcatgagagtgttgatactacagagactattttaaaagaatggatatctaagtatgacgaaaaagatttttatcagtgggctattgagcttaatgatctcgagcagcctatcggaactataagtgcaattaaaactgatgagagagttgagtcggttgaaatcggttattgtatcggaaagcgtttttggaataacggttatatgacagaggcactcactgctatcatcagatttttcatcaatgaggtcggtgccggacgtgtatgggccagacatgatactgaaaatccaaattcaggcaaggtgatggctgcggcaggcatggattatgagggtactttacgccatgcaggcttcaacaatcagggtatatgcgatgaagcggtatatgcaaaggtcagaagtgcagcacttgaagaggagcctgaggatgagactcctgagcagcaggctgttaccacaaaggtgatgggcgaggacggagtcatgagaaacgtaatctctgatgagactatggagtatgtcggaatccttgcaaagcttgagctttcaccggaggaggcagaggctgccaagaaggatatggcagatatgcttgattatatcgacaagctcgaggagcttgatacttcgggaattgagccaatgagccatgtattccctgtaaacaatgtattcagagatgatgttgtcacaaacggtgacggaagtgaagctacacttgccaatgcaccggtcaagaaggacggcggattcaaggtaccaaagacaatcggcgaataacggcaaggaggagaaaaatggatttaatgtctttaactgccgtggaactcggcaagaaaatacaggcaaaggaagttacagtggaagaggctgtaaaggctgccattgcttctataaaagcaaaagaagaaaagataaacagctttgtcacaatagacgaagagggtgcacttaaaaaagcagcagaggttcaggcaaaaattgatgcgggagagctaaaaggagcgcttgcgggtgtgcctgtagccataaaggataacatgtgtacagaagggcttctcaccacatgttcatcaaagatactctacaatttcatcccgacctacacagcggaggctgttaagcgccttgaggatgcaggctgtgtcatcgttggaaaaaccaacatggatgagtttgccatgggaagcacaacagagacatctgcctttggagcaaccaaaaatccatggaatacagagcacgtaccgggaggttcatcaggtggaagctgtgcagcagttgcagcagaggaggtaccgtttgcactcggttcagatacaggcggatcaatcagacagccaagctccttttgtggtgtgacaggaatcaagccaacctacggcacagtttcacgatatggactcattgcctatggctcatcgcttgaccagattggacctatcgcaaaggatgtcacagactgtgctactatacttgaggcaatcgcttcatatgatacgaaggattcgacatcagtaaacagagacgatttgaagtttacagaggcgcttgtcgatgacgtaaagggtatgaagattggtattccaaaggattatctcggagatggacttgacccggaggtaaaatcggcaatccttgcagcggcagatgaattaaagaaaaaaggtgctgttgtggaggaatttgacctcggacttgtagagtatgccattcctgcgtactatgtaatcgcctgtgctgaggcaagctcaaaccttgccagattcgatggtgtcaaatacggataccgtacaaaggagtacacagaccttcacaacatgtacaagaaatcgcgttctgagggctttggacctgaggtaaagagaagaatcatgctcggctccttcgtgctttcatcaggatattatgatgcatattacttaaaggccttaagggtaaaagcacttatcaaaaaagcctttgatgatgcattcgccaaatatgatgtaatacttggacctgcagcacctaccacagctccaaagcttggagagagcttaagtgatccaatccagatgtacctcggtgatatctacaccatatctgtaaaccttgcaggtcttccgggaatatcgcttccgtgcggcatggacaaaaacggacttccaatcggattacagctcatcggagactgctttaaggagaagaatatcatccgcgcagcctacagctttgaaaaaacaagagagcttaagcgcagcgctattgcggaggaatacagtaacaaaaatgcagcagacaccaataaaactgccggtgcacagtaggaaggaggcaaaaaggatatgaaaaactatgagacagtcatcggacttgaggtccatgtagagttagctacaaaaacaaagatcttttgcgcctgctccacagctttcggaggcgcaccaaatacacatacatgtcctgtctgcacaggacagccgggctcacttcctgttttaaacaagcaggttgtagagtacgcagtggcagtaggacttgccactaactgtaccatcacacagtacagcaaatttgacagaaagaactatttttatcctgataacccacagaactatcagatatcacagctttatctgccaatctgccgcaacggttcagtggagattgagacagcaaacggaaagaaaaacgtcagaatccatgaaatccacatggaggaggatgccggaaagctcgtacatgacgagtgggaggacgtatctatcgtagattacaaccgttccggagtacctcttatagagatagtatcagagcctgatatgcgctccgctgaggaggttatcgcataccttgagactctgcgtcagaccatccagtatctcggagcatctgactgtaaattgaatgagggctcaatgcgtgccgatgtcaacatctcagtcagagaggtgggcgcaaagaagtttggtacacgtacggagatgaaaaaccttaactccttcaaggctattgcacatgccatagaaggtgagcgtgagcgtcagatagagcttcttgagatgggcagaaaggtagtacaggagacacgtagatgggatgacaacaaggaatcatcacatgccatgcgttcaaaagaggatgcacaggactacagatatttccctgagcctgacctcgtgccaatcgtcgtatccgatgaatggatcgcacagataaaggcaaagcagcctgagcttcgtccacagaagcttgcacgctacaagaaggaatacgacatccctgagtatgatgcaaagattctcacagagtcaaagcatatggcagacatatttgaggctgccacaaagctctgcggcaagccgaagaaggtttcaaactggctgatggttgagacaatgcgactgttaaaggataatgatatggatgcagatgagataaaattctcacctgtaaaccttgcaaagcttgtagatctggtagatgcaggcacaatcaactcatctgttgcaaaggaagtatttgagaaaatattctcggatgatatcgaccctgagcagtatgtcgaggagaacggtcttaagagcatgaatgatgagggtgagcttaaagccacaatccaggctgtcatcgatgcaaatccacaggctgtggaggattatcacaatggcaagaagaaagctatcggagcacttgtaggtcagactatgaaggctacaaagggcaaggcaaatcctgctgttgtcaataagcttcttatggagctgttataatagatattaagaaaatggatccggcaggtcttttgatctgtcggttctttttttcaaaagcgcctcagcttgcttgcacgcatttattcagtagtgtataatagttaaatggctgataaagcagctaaatgatacaaaggcggtaattcacctatgaataatgatgatttcaaggaagtacctgacaatattcaggataataatggagaaactacaaataacatagataatacaaacgataacaagtcaaacgactacgaggatgtctgctatatctgccgcagaccggagagcgtggcaggaaagatgatacatatccagccgaacctgtgcatctgcaacgattgtatgcaaaagacctttgactccatgagcaacggtaattttggcaacctcggaaatctgggaaatataagcaatatggattttggcaatatgcccaatatcagcatgataaatttgtcagatctgacaggaggcataccaaacagccagaagcttaagaagaaaaaaccaaaggaagagaaaaaggtcgagccgattcttgacattcactcaattcctgcaccgcataggattaaggcgagtcttgatgattatgtggtaggtcaggagcatgcaaagaaggtcatgtcggttgcagtatataaccactacaagcgtgtcatggcagacaataagcataaggcagaggaagaaaagacaactgcaaagcagagttcaaaaagtttcgatggtgtggagattgagaaatcaaatatgctcatgatcggacctacaggttcaggaaagacatatctcgtaaagactcttgcaaagcttttagatgtgccacttgccataacagatgccacatcacttactgaggccggatatatcggtgacgatatcgagagtgtggtaagtaagcttcttgcggctgcagataatgacgtggagagagctgagcacggtatcatttttatagatgagatagacaagcttgcaaagaagagaaatgccaaccagcgtgatgtgagcggagagtcagtgcagcagggtatgcttaagcttttagagggctcagaggttgaggtgccggttggtgccagcagcaagaatgccatggttccgatgaccacagttgacacgagaaatattctctttatctgcggaggtgctttcccgggacttgaggatatcataaaggagcgcctgaacaaggaggcttctataggcttcaaggctgatttaaaggacaagtatgatggggatgagaacctgctcatgcaggcaactgttgatgatatccgcaaattcggaatgattcctgagtttatcggacgacttcctatcatgttctcacttgaggctctcaccgaggatatgcttgtaaagatattgaaggagccaaagaatgccattatcaagcagtatcagaagcttcttgagatggatgaggtaaggcttgagttcgatgatgatgcgctttatgccatcgccaagatggcaaaggagaagaaggtcggagccagagctcttcgtgcgattatagaggatttcatgctcgatatcatgtatgagataccaaaggatgacaatatcggcacggttacaatcactaaggactatgtggagaagaagggcggcccgctcattcagatgagaggtacacctgagcttgcagacagtcagcacgtttaattgttaaatgattatgaaattgtgaattggctgtaaatgatgcaaccaggctatgcgtaatgaatctatgtgtagtctgtaatgatttataaacgttcatatatcaagaggaattggaaaaatgaaaattatccactgtgcagacctgcatctggattcgaagatgacctcgaatctgtcaaaggagcaggcaaaagagagaaaaatggaaatactgcgtacatattcaaggatgatagagtacgccaaaaataacgatgtaaaggcgattatcatagcaggcgatttatttgatacgagaaatgtgtcagcgactgccagaaatctggtaaaggattcgattacgtcaaatccggatatcgatttctattatcttaagggtaatcacgactcggacaatttcatatcaaagctcgatgaaatccctgacaaccttaagcttttttctaatcagtggacctcatacagctatggaaatatcacaataacaggtcttgagatagacaagtctaaccaggctgttatgtacaattctcttgtgctcgacaatgacaattacaacgttgtcactctccacggacagctcggtgatgagatttccacaggcgaccttaagaataagggcattgattatctcgcgctcggtcatgtgcatgagtatcagagtggacagcttgacaaccgtggcatgtactgctacagcggctgcttagagggaagaggctttgatgagtgtggacaaaagggctttgtggtgcttgatatagatgatgagaagctcacggcaggctttagctttgtaccgtttgcgtacaggagcctctacacgctgtatgtggatgtgacaggagccatgaccacacaggatgtggctgtgaagatggaaaaagccatttcggacagtgaatattcatcgagaagcatggtaaagttcgtgcttgtaggtgaggtggacgtggattgtgagataaacacagatttcctcaaggatatgttcgaggaatatttctactatgaaaaggtgtatgatgagacaagacttctcatcaattacagtgaatacgaaaaggatgcatcacttaagggtgagttcatacggatggtgcttggctcagatatgaccgaggagcagaagtctgaggtcatcaggtgtggtatatcggcgcttagcggggaggagatttagaaattgaaattaatagcttgtcacataaacaacttcggaaagctgtccgatcttaatatcaatttcaatgatggagtcaatgtcataaaccagccaaacggctggggaaagagtacacttgcggcttttttgaaggctatgctttacggctttgatacgaaaaaggagccgggcgcctttgagagggaaagaaagctctataagccatggcagggcggcacttatggtggagagcttgattttgaggccgatggagtggagtacagacttgtaaggacatttggcctcacagaaaagcaggatgattttcatttgtacaggcttgcaaccatggttgagtgtgatgatttttcaccactgcttggagaggagctttttgacctcgaccgcagctcgttcaagagaacgatatacatagcgcaggcagactgcatgttttcgtcatcagacagcatcagcgcaaagcttggcaatatggcggaaaatacaaatgacatcaacaacttcgagtcggcgacagcggacattaaggacatgatgaacaagatgtccccaaaccgtatcacaggctctatcaaaaagcgtgtaaatacactcacagccttggaacaggagcttaagaagtatcaggcagcggatgaggcggcagcacagctttcagagaaaatagatgagaaaactgcccagaagaaggagcttaccggtatcagagccgagtacggcagggcgcttcaggtggcatctgaggacagcagaaagcaggcacttcgtgaaaactacgagcagctttgtgctgttgcaaaggagaaagagagcatttacaatgctgcatcggcagtctttggagataaagcaccggatgaggcagagcttttggaaaagacaaagcaggccggagagctagaaagcttaaaagctgtagaagataatctgagctttacgcctgaggaggagcagtatttagatacactttcaggtatgtttaaggatggtgtgccatctgatgatggtcttgatgagatgcaaaagaagattgcaaacatccagagcgtcaagaatgagtacagccacatggagctcaagctctcgcagatgacctcacttgcaaagatggcagatgatgaggaggaaccggagacacctgagaagactaagcttgtacctgcgggtattgtgcttatggttatcggtcttttggcagcagctgttgccacggtattcagtctgaatgagaagtacaatgtgaaggaaatcatgtttcttgtggtaggcatagctggagttgctatggcgctttgcggtgttgtcatgatggtctatggaatccgtctgaacaacaaaaagcagagagcatacatcaggcttatggctgagcgtgaggaaaatataaagcagaaggagataccgattcaggaattaaaggagcagcttgagcagattcaaagcggcattacatcaatggagcatgaggtatcgcagttttttgacagcttttcgattgaagcagatgaatcgcagtatcaggagaagctttatgagcttcgcacaaaggctcatgactacagtcgtttcaacgagcagataggaaagcgtgccaagacaaaggctgactatgagaaggcgaaggcttcgcttgatgagtatttaagtctctatggatatgacagtgctgcagaatatacacaggcactttcacagatgaaaaagcagctcgcagaggccggctttgcaaaagaaaatatggacagtgctcttcagaagaaagcgcagtttgagaatgacaacgatatggacaagcttcttgcaccaaatgagtgtccgtatacacttgatgagcttaatgagatgatttcaaaggttgagggcagcctcgatgaaatcagggcatccttagtgcagtacggcagacagatggatgatctgcaggagcagcttgatatgagggatgaaaaggaacaggagtaccgcaactgcaagcagatacaggctgaggaaaagcataagtacgagatacttgggcttacatcagactatctgaccagggcaagggagcagtttactgccagatacatggcgcctatttccaatggcttccagaagtacttcggtatcctgacagaaaatacagacagagactggcaggtggatgccaatatttcaataaggatgaaggagcaggggcagcttcgcgatgtgagaaccatgtcggcaggctacaaggacctgataggcatatgtatgcgttttgcgcttgtggatgcgatgtatccgggcgagaaaccgttcctcatacttgacgatccgtttgtgaatctggatgatgagaagcttgctcgaggcagaaggctgcttgcggtgctttcgcaggattaccaggtgatctattttacatgtcatggaagccgcgagtaaattttggtcgaagctttgtttatattaattgataaatatagtagcatatttttatttatagaatataattatatgagggtcaaaatatcttttgaccctcatatctaaatattatatcatatgaggtaaaatatgcagttcatagtatcaaaaaaggagttcattccaccggtaatagctcctgatatcatagagacattgggcgatgattacgagatatggacatatgaggattacgaaagactcccaccacttctggtgggagtttattcgtattctgctattccaaagtgtctggctcctttgtccacgcagggacttgtaaagagcggtgtgttcaggcttcaaagggagtttgttccgggactatacggaaatggtgtgtatgtggtggttattgacacaggtgtgaattatgcgcaggaggcttttatgacacctgagggtaagacgaagattgcagtgctctgggatcagaatacggatacggtttattctgaggatgagataaatgctgctattttatcggaaaatccatatgagagcataccgggtgatgaggatgggcatggtacgtttgtggcgagcgtgatatgtggcaatgacagaccgcaggatgattttgcaggggtggcaccacaggctaagcttattgtcgtgaagctgaaaagggcacctcaaaagctgtatgatttctactttattccggatcgtaaaatagtgtactcggaggttgatgtgatgagagcagtgcattttgcagatgagtttgcaggtcaaaagggagcaccggctgtcttttgcatggcgcttggctgcaataacggaagccacacgggagctgaggatctttcagagtatctggactatatcacggcaaaaagaggcagggccgtggttgcggcagcgggcaatgaggcgaacagcaggcatcattataaagggcgcataacagatacagtcgatgatattgagataaatgttgagcaggatatggatgggttttatctggaatgctgggcactttcacctgagctatttacgctttctgtcatatcaccgagtggtcagtcgaatccggcaggggtaccaatgcgaatagacagcggtgaatactcatttctgcttgaaggaacacaggtgactattgactacaggcagaccggcagacagacgagggatttgcttatatttatccgctttgaaaaggtggtgaagggagtgtggaccatcagggtatttccacttagtactattggaggtgtttttaatatgtggctcccgatgacaggacttcttgatgctgatgtgagctttattgtctcggagcctgataccacgctgaccatgccttcggatgctaagcttgtgataacggcgggaggctataattccctaaatgatgcaatacttttagagtcgggaaggggctttgacgcagacggtggaataaagccggatctcgtagcaccggctgtggatatcacaggggcaaatctaagaggaatgtatatagcactaagtggcacatcggcggctgctgcaatcactgcagcggtggcggctctcatcatggagtggatgatagtgagaggcaatgttttgctcgcaaacggagtggatataaaaaatgtcatggtaagaaactgccgcagaaaagaaaaaactgactacccaaataaaatttttggctacggattcatgaatgggtttgccaatttctaagaaaacggatataatatattctaaaagataaaaaggaagggtgaatggatgacaaaaagcaataatttattagcggattacgctgcaaaaaaacaggatatctgtattaaaaatgacacaatttcagatagtcttttcagggaatatggtgtcaacagaggacttagggatgtaaacggaaagggagttctgacaggtcttacgaatatttcggagattgtttcatttaaaacgggcgaggatggcagcagcgtgccatgtgacggacaattgtggtacaggggctacaatgtaaagacacttacaaacaacttaaggcccggtgagtttggttttgaaaaaattgcttatctgctgcttttcgggcagctgccatctgagagtgaattggctgagtttacagaggttttaggaagaagcagaacccttcctaccaactttacgagggatgtcatcatgaaggctccgtcaaaggatatcatgaattccatgacgagaagtatactgacactggcttcatatgatcctcttgtagcaaaggcgggcatcgacaacaatatcagacagtgcttatcacttgttgcaatattcccgatgcttgcagtttacggttatcatgcgtataatcattatgaaaatgatcagagcatgtatattcacaggccggatccaaagctttcgacagctgaaaacttccttaggatgctcagagctgacaatcaatatacagagcttgaagcaagggtgcttgatatggcacttattcttcatatggagcacggcggtggaaacaactctacatttaccacccgtgtggttacatcggcaggtacagatacatactctgctatcgcggcagccatgtcatcccttaagggaccaaagcacggcggtgccaatatcaaggtgatggagatgatgcgggacatccgttcgcatgtgaagcactgggatgatgaggatgaggtgagagcctacctcagaaaaatgatggatggtgaggtatttgaccacaagggactcatctatggaatgggacatgcggtgtattcactttctgacccgcgagagcgtatattcagaggctatgtggagaagctttcggtggcaaagaatagagataatgagatgaacctctataatacaatagagaaggtagctcctgagattatcgctgaaaagcgccatatctttaagggtgtttctccgaatgtcgatttctacagcggctttgtttatgagatgcttggtattcctatggagctttacacacctctttttgccattgcgcgaattgttggctggagtgcccacaggcttgaggagattgtcggcatgaacaagattatccgtccggcttacaagagcgtcatgaaagagatagagtaacgagaggatgttacagtctatcgttcatatatcaaaaatacgatatgttggggattagacatatttaaaagaatcgaggtattatacaaatgagttttacaaaggtaaaaaagggcgtctgtgcagcaaagggctttgttgcaaacggattaaactgtggattaaacagtgacaaaaacaaaaatgacctggccttagtttattcagaaacacagtgtcaggcagcggctgtttacacaacaaacaaggtgaagggcgcgcctattcaggtgacaaaggcacaccttgaggcatcaggacatacggcaaaggctgttattgtcaacagcaaaaacgccaacacctgcaatgctgacggagtagagaaggctcagagaatgtgcgagcttgcagcagcagagctttcgattgatccaaacgaggttatcgtggcatctacaggagttattggccaggtgcttcctattgagcctatcgagagccatataaaggagcttgcaaagggactttcggcagacggcaacgacaaggctgtaaacgctatcatgactacagataccgttccaaagcagtatgcggtaaagttcatgcttggagactgtgagtgtacagtaggcggtatggcaaagggaagcggcatgattcacccgaacatggctactaccttaaactttatcacatcagatgttgccatctcatcggagctcatccagaaggccctgagcgagattgtaaaggttacctacaactgcttaagcattgacggcgatacctctaccaatgatatggtaagcatcatggcaaacggccttgcaggaaacacacctattactacagagaatgatgattatcagacctttaaggatgcactgtacgaggtgctttcaaatcttacaagaatgcttgcaaaggatggagagggtgcttcaaagcttttagagtgcacatgcgcaggtgcgcctgatcttgatacagcaattattgtggcaaagagcgttatccgttcaccacttttaaagtgtgctatgtttggcgaggatgccaactggggacgaatcctttgtgctataggctatgcggaggctgattttgatatagacaaggtggagcttcacctgcgctcaacagcaggaagcatcaaggtgtgcgagaacggtgccggagttgaattctcagaggaggaggcagcaaagatactgcatgaggatgagatttatatcgacatagatctgcaccagggagatgtgtcagccaaggcatggggctgtgatcttacatatgattatgtaaaaattaacggagattacagatcttaatcttgacaagtaatattgattaatgatattatttttctaaagtaattaattaaaaaagtaaagcgaacgagggcgttcagatattaggttatctgcgccctcttttttgttggaaaaattacatttacaaaagagagattaggaggcggtacattgactaagaatgcattggatatgattgatgagaaaatagtagagctgctgcaggaaaatgcacgtatagcgataaaggagatagcggcacaggtgtttttgtcatcaccggctgtaacagccagaatagagagattggagagcaagggaatcataaagggatatcatgccactgttgattcggttaatctgggctataagataaaggcctttgtcaatctggatctggagcctgtacaaaaggaagagttttatccgtttattgagagtgtggagaatgtcatagagtgcaattgtgtgacaggagagtattctatgctcatagaggtgaagtttttgggtacggaggagcttgatgactttatcaacaatctgcagaaattcggcaagacaagtacacagatagttttttccactcctgttgagcacagaggcctgcctgtacattcaggttttgatgcataagatgatatgagagtcaaaagatattttgcatgattgaatgaagtgtgctaaaataatttgcaaaaatactgactgttaaacatgattttggatgctttgaatagtcagatatattgattacggcaggaggataatatgagtaagaaattaggcttcataggttgtggaaacatgggaaaggcaatgatacacggagtgctggcatcaggcaaggcacaggcaagcgatattcttgcatctgcaaagaccgaaagctccagagaaaagaatgcagcagagcttgaaatcaggctgacagcggacaataagagcgtagcagagtttgcagatattctgtttttagcggtaaagccacagtactatgaggaggttatagcagagataaaggacactgttagtgacgatgaaatcattgtttcgattgcaccgggcaagtcactttcgtggtttgacgagatgtttggaaagagcttaaaggttatacgtaccatgccaaatacacctgccatggttggtgagggcatgatgggagtctgtgcaaatgaaagagtatcgcaggcggagcttgatacagtgcttgatttgtgctcgggcttttcaaaggctgagatgatagacgagaagctcatggatgtagtgacagctgtcagcggaagttcaccggcatatgtgtttatgtttatcgaggctatggcagatgcggctgtagcaggcggcatgccaaggagccaggcatatacatttgcagcccaggcagtgcttggaagtgcaaaaatggttctcgagacaggaaagcatccgggcgagctcaaggatatggtgtgctcaccggccggaacaactatccaggctgtgcgtgtgcttgaggaaaagggcatgagaagcagtgtttttgaagctatgatgaaatgccttgatatctcccgcaaaatgtagtagaattattgcattgagttaaaggagaaaagcaatgagtcaggcaaaggttgataaatataagaatgaaaaggcaaatcgtaaaaagacaaatgccagaaataaagtaaagcgtgttatagcacgaattgttgcagctgcggctgtaatcgcattggtaggctggggcggttactccggatatcagtactatgagaagagtcgtccggtgaactgctattacgcagatatcagtgcagtcagtgattatctacagggattatctacagacagtgagcagtagattatatttttgatacataacatatattttacgatttatatgattaagttaaaatacctcgcaggttactgcgaggtattttcagtttttgaagaatccccgggctctttttgtgattcagatacagtctttgcattttcttcggtatttgagctgtcagagttttttgctttggagagtgtgttatcaattgcgtcgagcagcactttggaggtgtactgacttgtgtttgcgtaggaaatattatcggtggactgattttgcacaatctgcgatacgagctcgttcatcgcaggctcaacaagcggatacatggtttccaccgaatcagtcatgttttcaaggcttatggagttaatgttattactgtccaccgccacagacacatcgatagctgccccacccagcgctacagatgtattgtacacacccggtgtatacatgccggtttcttcgactgcaggctttggctcatcacctgaaaagaaatatgtagcagcgaaaattatcagaagaagcagtatgccaaggagcactccggtgagaatgacatgcttcatttttacaacgacgatttttgtttttgcactcatatgcgcctcctgtggttgttttatatataatatgtgtggggacgcggaaatatgacagatattcctgcctataacgaaaaagagatatccatgaaggatatctcttttatgttctgcgccgaccgtttcacggcttccggtggatgccggttttgaaacgaccgaaacggagtgtagacgtggaacggagacaagaagccgcaccgcgggtgagtggctccgctacactcctataacgaaaaagagatatccataaaggatatctctttttcgttataagagcgatagacggggctcgaacccgcggtctcgaccttggcaaggtcgcgcgttaccaactacgccactatcgcatttgttatgtttgtgagatctcttgtgtcgagcacgtgttatataatacacgatagtggagcatctgtcaacagttattttaaatttttttaaaaaagtttgacgataccagataaaacggttgtattgataaattgttctgcaccgcaggtgagaggctccgctacacttctataatgaaaaagagatatccatgaaggatatctcttttcgttataagagcgatagacggggctcgaacccgcggtctcgaccttggcaaggtcgcgcgttaccaactacgccactatcgcat

SEQ ID NO: 1610 - DNA, 331 bp, Unknown
  gut microbiota DNA sequence
gcaagaatgaaactcaaaggaattgacggggacccgcacaagcggtggagcatgtggtttaattcgaagcaacgcgaagaaccttacctggtcttgacatccttctgaccggtccttaaccggacctttccttcgggacaggagtgacaggtggtgcatggttgtcgtcagctcgtgtcgtgagatgttgggttaagtcccgcaacgagcgcaacccctatctttagtagccagcatataaggtgggcactctagagagactgccagggataacctggaggaaggtggggacgacgtcaaatcatcatgccccttatgaccagggctacac

SEQ ID NO: 1611 - DNA, 514 bp, Unknown
  gut microbiota DNA sequence
tattgatttattgatataatcagtacggatattatctattttatgatgaagtctttgtactttgagcttttgcttttgtatattcttttgagtggactctcctttctttaagttctcatattttcgtgagagacatctttgttctctacgcagtttcttttccaattttttaattcttgttgacttattgatatttttataagttttaccattggaaacaatcgccaagtcttttaaacccaagtcaattcctataccaccattgctattattagcaatcttaacgttgggaatttctacaagaactgacacatagtatctgtctgctttgacggatactgtaccgcttttgattttccatccgtctttagttgttggtatataacctttttctttaatgcgtacccaacctaaagtgggtatgttcagcctatgtctctcacatctacagtctttagtattgttctttacgaaatacatttttacatcagatttacctttctttttgaaatta

SEQ ID NO: 1612 - DNA, 271 bp, Unknown
  gut microbiota DNA sequence
tttgtaattaaatcattcagcttttcctcatctgacgcatttttcaataactcaaacaatggcctgagccctgtctcgaacttggaaaagtctgtaatctccagtggattcagcaaattaatcctgtaatcattgatgaatgggagtattctttcatccatctttggcatcatctctgcaaggcttcttggcccatcccactgtgtagttccaagatacagtgtgattgtaatcaccggtgtcagcttatcatcaagtgtaaagcctgaca

SEQ ID NO: 1613 - DNA, 1397 bp, Unknown
  gut microbiota DNA sequence
aaggaagtggcgtccggacatacgcgatttcaagaggcatcggcattaaaagtaatcgaatcatttaaggaggaaaaccgatgaaaacatttatggctagtcctgctacaatcgacagaaaatggtacgtagtagacgctgaaggtaagacattaggacgtttagcatcagaagttgctaaagtattaagaggaaagaataaagcaatctttacaccacacattgacacaggtgattatgtaatcgttgtcaatgctgacaaggttaaggttactggtaagaaattagaccagaagatttactatcatcactcagattatatcggtggtatgaaagagacaacattaagagagatgatgaacaagcatccagagcgcgttatcgagtacgctgtaaagggaatgcttccaaagggacctcttggacgtcagatgtatacaaagttattcgtatacgctggaccagatcacaaacatgcagctcagaagcctgagacattagagttttaataggaggtaaagtaaattggctactacaaagtattacggaacaggaagaagaaaatcatctgttgctagagtatatttagtacctggaacaggaaagattacaatcaataaaagagatatcgatgagtaccttggtcttgagacattaaaggtagttgttcgtcagccattagttgcaactgagacagttgacaagttcgacgttttagttaacgttcgtggtggtggatacacaggacaggctggagcaatccgtcacggaatcgctcgtgcactccttcaggtagattcagagtacagaccagttcttaagtctgctggattcttaacacgtgatccacgtatgaaagagcgtaagaagtacggtctcaaagcagcccgtcgcgctccgcagttcagcaagcgataatcgactgctcagactatatcaaaatggttcaaaaagcccggaaaatcaaggttttccgggcttttactatatctaaacgggctgatatggtttgaccaaatttggcaaaacgagagccgatttcatccaatttttagtggtccgcaagtggttaactggccaaaaagagggcgaaaagagggggaagtggttcccaaagtggttaaccgagagccgatttttggggtgcttttcagccctcctttccctcgttttttggctgtggcagtttggcatagtttgagctaatttgaataattgaatatgaatttgatgtagcacacagtataaatgctgggtgcttttttcatttcaggaactcgtattccggcgatagaaagagccgtcacttcactgttaattttgaagtggcggctttttctatttccagaagcaacagcaataattagaaatgaggtgaagtcaatgaacacgcaaat

SEQ ID NO: 1614 - DNA, 281 bp, Unknown
  gut microbiota DNA sequence
agggcatatcgtaaaacacgagagccacgtttggacatccttgttgtcttagcctgaaagttaccagactgataaacagaaggatccagacctgcaaaagcaagcagcttgtttggattggagaaacggtgaatatcacctatttcaccaagaatcattccaccattgatataaccgataccaggaattgtcatgatgacagaatcgttgaatttcatgatatccgtcatctcagcttcaatcttttctaattggctatccagtaactcgatttgttgaat

SEQ ID NO: 1615 - DNA, 1196 bp, Unknown
  gut microbiota DNA sequence
ctgaaagtttctttttcttgataaatggggattagttttccttttttccaatcagcaataaccacctatggtcaaagcatatttgtccctccttgatatagggattaaaacctgttttatctccaccattcaaatcgtattccattttatcaataatatctttttgaatatcctctggtgtacttgtcaaatccatccaactttgtagatttacaggaacaagtgttgtttcttcaagctgaagctcaaaagcatcctcaaacaatgcttcaaattcttctctgctaagtattcttgtatgtgagttatcacgcatcgtttcaatagcgtcattagtttcacgcaattcttctgtagtcgctaccatatcccaaataacaagttttccaccttttttcaaaactcgttgcatctcccgaaaaggcttttcaggctcaacaaaatggtgcaatgaaagtcttgtaatcacaaggtcaaatgtttcatcttcaaaaggtaagcattccgcattccccgatacaaatgatatgttctgaataccttcttgctttgccagtttttttccctgctccaacattgcttctgtcaaatccaaacaagtaatgtccttaacataaggagccactgctcttccacatatacaggttccagcagcaacctccttttattcctgctgaatcatcttaaaatgctccaatgcctccacaattgctctctccttatcctccgggcactgtggttgcctactgtcttcatttttaggtaaattataattctttccaacctcaattccacattttctctttacctgtgaaatatacagattggaaaccttcatgccggcattatgttcaaacacatacttctttatctcatcatatgttgccttagtctctgcagatgttatatccacatcatcaagttcaattgtgacattaatgtaatcatccggcttttgtttcagttgggacaaaagaacaaccgtctccacatgataagtattcggaaacatatccacgcagcatatcttctccactctataccctctggccataaatatctgcaaatcccttgccaggcttgtaggtttacatgaaatataaaccatattctcaacaccatactctataatcttcccaatagccttcggatggataccgtctcgtggtggatcaaggattatataatccggtttt

SEQ ID NO: 1616 - DNA, 3729 bp, Unknown
  gut microbiota DNA sequence
ataaagcacttttaacaagaagttagtctcctgccgtggcaaacaaataaaatcttgatttttcccatatttcctgtattttcgggcttttcaagcctttttacctttcttcatttttcacttattctggcatattttggcatatctttgcatatttttgtcatcaattttggtaaaaactttggtaaatttcaagtctgtaccaaaggcaaatctgccattgggaatcgacaggtaagaaattggggattaagataaatactggcattcagccatttttctctcattttcatcaggtcattatgaattgattgctttttgaaaatcttcctgtgcatcctgaaatttaacatgagtataggtattcatcgtaacactgatatccgagtgtcccataatatactgaagcatcttcggattcattcccgacttagccatattagaacaaaacgtatgacgacacacatgcggtgtgattggcggcatctgaaccttatatatgctattgtacttttcccgaatatgctggaaatacttttcccaatgtaatgccaccataggcatatcatttttatcaaggaataaaaatcctgtcattccatcaaccatcggttcaactttgggattgaccctgtccttaagtattctcttaaaacaagccaccacctcatcagacattggaacatatctctcgccgctttctgtcttaggcttttcaatgatatactgcatctgacttgttctctgtaattgatgatttacccgtattcttttgtttttaaaatccaaatctgattttgtaagcccacagaactctgatatacgaagtcctgtgttaaagaggacaaatattgcatcatagtacttgcagaaatgcgcatcttcttttatgaatcttagaaattccctctcctgctttcttgtgacagcctctcttctcacactatcattcacaatcacattgactagttcaaagccaaatggatttttgcgaatcaagtcatcttcttctgccatctgaaatgccggtcttaatactccccggatagtatgaattgaactataaccttttccatctaccctctgaagcttgatcaaccatgctttcgcatccgataatttcactttgtcgattctttttttgccaaaatcatcttttttcagcagattaattaccgtcttataaccagcataagtactctgtctgacccctattttaaggctcacatatttctccactaattcaagaactgtaagccctccacctcttggaacaagtccattaaacatatcctgttccagctgtttttccttttctcttaaagaaagctccattttctttcctttaggtataggatcattatggtccaaacgccaactatataaatttccttcatttccatgaatatccacatatctaaaacgataacgtccatctgctctctggtactctccttcgtgaagaattctattgcgattatctcgtcttttctcactcatagctttgtctcctttcaaaaaagagagccctagcgtgattattgtaccacatttgtgcccccttttctactactttacatattaaattgcagttgactctgccagaaattgttcaaattgctctttcttaaataaaactttgtttcctactaacagataaaactccccatttggatggatatctacaatttgtctaagccgcttttcaccaatgtgataaaactgtgccgcttcagttacagaaagcaaatatcgcttccatataggaatatctatactctgattctctaattcattttcgtcatccatcatattctccaatctgcagctgtctgactaacatcgcatcaaccttttttattgcatctgtgctgacaatcatcccagcggtctgtattatctgttcctcatttattgtgaccagctgctctggtaaaaacattgttgtatgtcttaaaaatcctttaatttctgaaggctcaatattgaaatgtactggaatataatcctttctcatcttagttgtccccggtataactgtatatacaggtgattttccgtttgctttgtcgcagcttattacaatacatggtctccttccagcttgtatgtgcttgagtccatttttcaattcagcccacacaatcatatttctctttatcttcactgcatatcacctctctttggcggaatatacaagtctaccttgggttccttctcatctacactaaataatctaaacccagcttcccttaccactccaatttttaaataagaatctgctattccgtctgaaatagcatcgagatttgctacaataagtgcatctgcctttcctgctctcatatatcttattgccctataaaacacctcatcacttaatcttcgtccaaaaattcctctccggaatactttcatactacctaattggtagtagcctttaattttacggataaacaccgaaagatttatcggcactaaaagcggtaaaagatttcacggaattagtaatagtagcactaattcctgctgtttttccgtcgaaaccaaagctaacgctttctaatgaagcagaatcgtatgtatgaatatagtatgcggttgctacaccattgtagttaccaaaccaacggtcataggtgcaaagaccagaccatttatgacctacgtaatatccagacttccagtggtcttgtattctaaaaccaaagcctttacttccgtctccatcggaacggttggaagtagatgcacggtaattggaattgacatctgtcatataggcagaagcactcataactttggaagaatatttgttgctggaatttgtatatcctacaccaaaaccgtctgcaccgccgacatttcctgctgagtcaccgtattcattatttttccaatgtccaccacaggttacagaccaataggtactccatgcttcatagtagatagtaggagtgtctaaagcaacatcacccgaatctgttgcgcaggttgaagcactttcaataacaggtgcttcaaattcataaacaccataggtttcaagttctgcattgatagcggctttttcttcgggagttgcgttaggaacttgcaataataaagcgtcaacaatctctcttgttggagttggggaacttctcaataaagattgtttggcgtataattcgtccatttcttttgcaaaggtcaatttgtctgttgcgcttaggtagacagacgggttacccatatcattttgggaagctgtttcttccgtttatcctttggtggaagcacaggcacaaaaaaacagatagaaaggagtacataggaactatgaatgagcaggagcaacggaaagaggaaaccgcaaggcttgaccgtcagcaggcagaacaacacgccgcagaggggcggcagttgtcggaacgtgctttagcggaagaacgccagcggcaggaaacacagcgtatgcaggaagaacagcgcagacaagacaggaagttaagatagtttataactttgttggtgaaataccagatataaacaaatagatggaaatgcagcccttttcctatggagaggggctttttctatacttctgtatacggatatgaagagataatttacaacgctgagatttgtgcaatatgcacaaaaaaagcgatattattacatatattaaaacaatataacctatgtttttgtgataaatatttgacttagagaaagatttgtgttacc

SEQ ID NO: 1617 - DNA, 904 bp, Unknown
  gut microbiota DNA sequence
caaactaattccgcttctttacttccaatgtgaaagatacaattcatgtttcaaaaatacagggcaggaacgtatgtgggtaagaaataaatcatctgttaccaacttgaatacaatttcccatataagtctgttagcggttgctgttgcggcaatcaccaccggcacagggcaatcctatcgtaagcttaaagatgtaaagcgaatcgtataataaagagctattcatatctcccccatttctacaattgacctgtaagtttactaaaaaattaaaagatagagtcatcatgtgaaaataatatttctttcaattgtctcctacctattgttactgttttcacgaagcaacttcatttcctgaaaaggagttgatatcaccatcatcataccagataaaatcattatgctagaataaatttcattcaaattaaaacatgccataatcatagccaaaatgacaaaaatggaacaaatcccaagttgaaaattttttacttttccctttttatctttttttagcttaaccattaaaaatcctatatccaataacatatagaggattaaatctacaataaatagaaaaatacttaggtctttttcaaagccaattgctaaaataatattatataatcccaaaattaccgaacatactcgggttaatttaacatcccaaatcacatgtggtatcttccatttaaaagtagaccaaaccatcaaaaagcaaccagaaagcaatatcattgttctatttaattccataaacttccactcctattgttatatattttttaccatattccaacattaaaacatataatatactacactacaccattattcaacaatttattaaaaatggaaaaggagaattttactatttggcatgatttcggtgccattt

SEQ ID NO: 1618 - DNA, 195 bp, Unknown
  gut microbiota DNA sequence
gcccttttccagcttcctcggttactccatcaatcccttttggggctttcgccagcttgttcgcctctgcttcaattccattcagcccttttgctgtcattccactcgcaaccataccggcaaccattcctgctgtatcatttcctgtcacatctgtggttatcttctgcgcaccggctccggctcccattgaga

SEQ ID NO: 1619 - DNA, 226 bp, Unknown
  gut microbiota DNA sequence
tctgatctatcatctctgatatcgtgatttcaccttccggctctgtggtcacacgctctgctgccgtgcaatctgtttctgttgcctgagctgctgatgtgtcattttcctttttatcctttttttcacatgctgtcgccatacataacatacatgctgctatcataagaactgatattgctttcttcataataaattttcctttctgtatgcgttgcattcatgc

SEQ ID NO: 1620 - DNA, 402 bp, Unknown
  gut microbiota DNA sequence
ggatgtcttgattgttagatattcttaagaatagaatatttattcatcaaatcatttgtatgaagttttcaaggtacaatgctgtgattactatttttagttttcacagacttttgactgttttatcagtcattagaaaccttaatctcttaaaatctctaatcactggtaaaaccagttttttttataaatccggcagccacctaccttcccataccgttaccagtatagtattatcggccgcttcagtcttaaccatcgtgttcgggatgtggacgggtgtttcccaaaagcgcatcgccaccggaaatattctgttatctattgataactcaacagtgaaaaactctctactcgatttccttagaaaggaggtgatccagccgcaccttccgatacggc

SEQ ID NO: 1621 - DNA, 870 bp, Unknown
  gut microbiota DNA sequence
taacatatctgggaaactacggtgatttggaatcacctaaaagagatggttatacatttaccggctggtatacagcagctaacggtggaacacagattactaaagatacaaaagtagaggttacatctgatcagactatctatgcacactggacagcaaacagctacgcagttacatttgatgctgatggtggaacagttactgctaatacaaaaactgttatttttggaaatgcatatggtgaattacctacaccgacaagaaacggatatacatttgcaggttggtggacggctgctgacagtggagaacagataagatctaacagtgcagtaaaaacagcttcagatcatgtgttgtatgcacattggggattaaacagtgtatcagtatcataccagacacatgtagcaaatatcggatggcagaatggtgtgtcaaatggagctatggcaggaaccataggcagagggctgcagcttgaggcaataaaaataaatgtaaaatcagatgcagacattggtgtgatttatacaacacatgtgaaaaatgacggatggcatggaaactcgttcaatggagaacagagtggaacaaccggccagaataagcatgtggaagcattaatgttaaagcttaccggtaaagatgctgataagtatgatatctactacagagtacatgcacaaaattatggctggttagcctgggctaaaaatggagaggcagcaggaacctcaggatatgcatatagacttgaggcaatacagatagttgtaacagcaaaaggagatgcagcaccgacaacggcatatggcggttatatatctaataacacaaacgcatatatatcaaaaagcagtgctgttc

SEQ ID NO: 1622 - DNA, 10593 bp, Unknown
  gut microbiota DNA sequence
ggcgtatatgcctgtggcaggctgaccggtatatatgagcagacagagggcgtgcttgtagtgaatacgacggaggtgacagacgaggatggcaaaaaagtcaatccggcagataaaaaggtgcagtgcggtgattatatcctatctgtcaatgggcgcactgtggcagacaaggaagagctttctgaagctgtaaatgatatcatgaaggaatatgatgaaaggcatgaagataaaagtaccgtaaacattaaatttcttcgaggcggtgagaaaatgtcagcggatatcacacctgtcaggatggatgatggcagatattacatgggaatatgggtgaaggacgatctggcaggaatcggtactatcacttattatacaaaggacggccgttttggagcgttggggcatggaataggagacggaacgcaaagcggcaatctcttgtatgcaaacagtggtgatttgtacagcatgaagcttaccaaaatcaaaaagggaaaagccggcgcgccgggcgagataggcggagtggtatattttggcaaaaaaagccatataggcacacttgactgcaatagtaatctaggaatttacggacagcttgacagcgatgaattgtcggaatatgctgcagaggatatgtattatccggttgccggcaaggatgagatacacacaggcagtgcacagatgatatcggaaatatcaggaaaactggaaaaatataatctggaaataacaaatatagacagaaaagcgacagatacaaacaagggaatggagcttaaggtgacagacgacaggctgatagagctctccggtggaatagtgcagggcacatccggaagccctatcatacaggatggtaaaataataggagcagtcacccatgtgtttgtcgatgatccgaccggaggctacggcatctgcattgatgagatgctgtaattactgctccattctgtgaagctccggcagtactgtactaagcatggttacaaagcagatgcttccgccaatcacgtttgatacaggttctgccataaacacaccgtcggttcccataccaaaggagtatggcagaatatatgtcagcggtacaacgatgaacaccttgcgaagcagggagaaaaatatagcccgcttctttttgttaagtgatttaaaggtagtctgtccgatgtactgcagatccataaatatgaatgccgcaaagtagatatttaaagccttcaccgcatcatccatgagggtggcatcggaactgaaaatagtaatcagggcatgaggagcaagtatgatcatactccacatgacagctgtatatagaagcacgagcagccccatagtgaaaatagattttctcacccgggcaggtcttctggcgccatagttgtagcttaaaacaggagatgaaccctccacaattgcataaattggagtctcgaccatctgcctgatgcttgatacgatggtcattaccgatatgtacaaatcacctccggtcactgaaagcacgttgttgcagcatatagacaccagactgttggtgagctgcatgacacagccggaggttccaaggcttatgatatcctttgcatagcgcgtattttcaccaaattcagagagtgtcataaggcgcaccttaagctcagcctttttcctaagaaagtgaagcacatagagagcagacagtatttgtgagatgaccgtagcaatagctgctcctttgatgccaaaattaaatccaaatataaaaagcgggtccaaaaccagattggcaacggctccgattgcaacagacagcatgccggtagtggagtagccctgagcgttgataaagggattcatgccggttgaaatcatggatgggagtgttcctatcaaataaatgagcaggtatggcagagcgtatttgagagcattttcagatgcgccaaacacgattaaaagaggctttgcaaaaatcatgcacaaagctgtaaaaacgactgcgaatgtgcagaccattgtaaagctcatattcattatagtattggcggctctgtcatcactcatgcctctttttattgaaaaaagcggagcaccaccgcttccaaagagattggagaaagcgattgtcagcattataataggaaagcaaagccccacagcaccgagtgcagtggttcccatatccggtatgcgggcaatgtatatgcggtctactatattgtacaacaggcttagaatctgggctgccagcattggcagagcagcctgcaatatgtttttctttattgaatcattatcaaaatctatttttttcataagttaccccttttggatttgctttgttcattatatcaccacattaaaaaaaatcaaagactcagcaagttttgatatagattttatttatgacaaactaaaagaaaaatatattttacaatgacaaaaaactacagtaatatatggaatataaaaattacaaattattgaataaccatatataccggaggataacatgaagattacacagatacatacaaacaaaccacagtcgctctcctttgagatatttccacctaagaaggaggaagacttcaaaaatatagatgagatgcttgagatactctgtgattgtcatcctgagtacatcagcgtgacatttggcgcaggcggcagctcaaacaataacaagactatcgagattgcgaagaaaatcaagaaccagtacaatgtggagccggtcgtacaccttacatgtctgtgctataacaaggcagagatagatgagttcaccagacagctttcatatgagggcatcgagaatatcctcgctttaagaggagacagaaatccaaatgtgcctgcaaaggaggattttctccatgcaagcgatttgattaaatacataaaggacaccacaggtgatcagttctgtatcgcaggtgcgtgctacccggacatccatccggaggcagctgataaggtagatgatattaagaatcttaagaaaaaggttgatgcaggagcagagcttcttttatctcagctcttctttgacaatgataccttcttcaattttgctgaggactgcaggcttgcaggtatcaatgtgcctgttatcccgggcatcatgccttgtatcaatgcggctcagattcagagaatggttacaatgtgcggagcaaagttcccggagaagttccagaagattgtgcacagatacggagacaacaaggcggcactttttgatgccggaatgtcttactgcgagagtcagataattgagcttttagctaatgatgtggagggaattcatctttacactatgaacaatgtgagagttgcaaagcgtttaacagagggaataaagaaccttatttaggataatagttcggaacgtaagccccgggtaccgctggcgccacgtactcccgctgtcgctacgctgcgtggctaagatactgtacgaaattatgcttgatgggtttctatgcttgacgaaaccgtcgaaacgcgccgtccgtggcgcggttctcctcgcccctgcgtccatgcaggggcgtttctgcgtcttgtgggcataatttctacagtatctaagccacttcgctatgcgctccggcgggagtacgtgtgcgccccgcggtacccggggcttacgttccttacgctgtggtgaattcgcgttacgtgtggtggcacatggcaggtgtcgtgagagcgaatagcggagctgtctagatactgttgaattatgccagatgaaaatcagaaatgttccggcatggacgccgggacaaggagctatcgagccatggagggcgagtagcgacggtttcgtcaagttaagaaagtttttgaggcataattcgtacagtatcttgacagtatagcgtagcactcacgacacctgccatgtgccaccacactgcaaatgcgaataaaaaatatcaaccgttgcaaaaagtactccggatgattataataggtatattagatttgtaaatggaaacaatgtccatattaaatcgaaattagattatataatatattaaggagacagtataaaatgaaagaaaaatcaagaagcactttttccggcaacattgggttcgttcttgcggcagccggcagtgcggtaggacttggaaatatatggaggtttccgtatctggcagcaaaggacggaggaggactttttctgctggtgtatctgatacttgttctgacctttggctttgcattgcttaccactgagattgcaataggacgtaagtcaggacagggaccgctcaccgcttatggttttatcaatccaaagggcaagtttatcggtgtgcttgcgtgtatagtaccggctattattctgccttactactgtactataggtggatgggttttaaagtactttacaattttcattacaggaagcggtaagaatgcggttactgatggatatttcacaggttttatcacaggtcagtgggcaccaatcatattcggagtggtctatctgcttttaacagcagcaattgtcattggtggagtcaataaaggcatcgagcggttcagcaaggtgcttatgcctatccttgttgtgcttatttttgcaatcggaattttctcactgacgcttcattataaggatgcgtcgggcacagtaagaagtggtcttgagggacttaagatttatgtgattccggatttcaaggggcttacaatgcaaaagcttttcaccgtatttgttgatgcgctcggtcagcttttttattcaatcagtgtagctatgggaatcatggttgcatacggctcatatgtcaagaaagaatcaaagctcatgggctcaatcaaccagatcgagatttttgatacacttgttgcattccttgcaggtcttatgatcattccggcagtatatgtatttatgggccgtgacggcatgtcagcaggaccggggcttatgtttatatcactgccaaaggtatttaatgaaatgggaatagcaggagatatcgttggactgatattctttatgatagttgcattcgcagcagtcacatcgtctgtatcaattatggaggctattgtatcgagtcttatagacagatttcactggagccgcagaaaaagcgcaattttagtcacggtatacgccttgattgcagagataatagtctgccttggctataataagctctatatggaggttaagcttccaaacggcacagtcggacagatacttgatataatggactatgtcagcaacaatgtgctcatgccaatcgtggcacttgccacatgtatcctcgttggctggatagtaagtccaaaggtaataatagatgaggtgacacgcggaggcagcaaattcaccagaaaagggctttatataatcatggttaaatttattgcaccggcattcctgcttatactgttgctgcaggcactgggaatcgttactttttagtattgaaataaatttattgtatattttatataaaaacccttgaaatacagccatcataatggtagtattttactaaatgatgaaagagggggagccactatggcttttagacgagagaaaaagcgtatcggtgatatgcttataaatgaaaatgtaattactcaggagcagctggaaaaggctctgcctatagccaaagaaaagcataagaagataggagaaacactcattgagcttgggttcaccaatgagcttgagatagcaaaggcattgtcacagcagctgggacttgagcttgtgaatgtgagcgcacttaacatacctgaggaggtgcaaagcctcgtcagtgaatcagtgctcagaaagcatgtcatgataccatatgcctttgacccaaataatgccaatatagtgcatgtggccatggccgatcctatggatatggtggcgcttgatgatttttcaattgttaccaatctgcaggctgagcctgcggtagcgacaggcagagacatacttttgacgcttgacaaatattacggtgatacagaggccatgaaagcggctcaggagtatgcgagggagagaaaagagcgtgagcagaaaaatgccgaggctgaggaagcaaccagcaaggatgtcaacaattcgccggtagttctgcttgtcaattctatcattgagcaggcagccagactcagggcctcagatatacatatagaggcactggaaaataaagtcagggtgcgatacagaatagatggtgcgctttatgagaaggcagcatatagtatacatctgctttctgcaattattacacgacttaaaattataggtggtatggatatttccgagaaacgtaagccgcaggacggccgtatcactatggagatagacaagacagagtatgatatccgagtatcaatccttccgacagtattcggtgagaagtgcgttatgcgacttgcgcagaaaaaggcacttacaagagataaaaaggagctgggattttcagacgaagagcttaaggcctttgatcatatactgatgaatacaaacggcatcatccttgttacaggacctacaggaagtggtaagtcaaccacactttacacggcactttccgagctcaacagggatgatgtaaatatcattacagttgaggatccggttgaggccaatatagatggaataaaccaggtacaggtaaataataaagctgacctgacatttgcatcagcacttcgttccattctgcgacaggatccggacatcattatgattggtgagattcgagatcaggagacagcacagattgcagtacaggcgtcaatcacaggacatcttgtggtcagcacactgcataccaacagctcggcaagtactatttcacgactggaggacatgggagttgaaagttatctgcttgcggattcggtaaagggaatcattgcacagcgacttgtaagaagactttgtccggcatgtaagagagagcatctgctgacagaggaggaaaaggcctttatgaatataccggcattccgtccggtaaagatttatgagccatgtggctgtgaaaaatgtgccaatacaggctacaagggacgaatcggtatatatgagataatgaccataacaccaaagctaaagtcacttatttcaaaaggtgttgatatagaggatataaacaaggctgcatgtgatgagggcatgcatacacttagacagagtgcagagaagcttgtactcgaaggagttacttcattccaggaaatgttaaagactacgtttgaaaactaagggggaaaagaaaatgcagatagtagacattttaaaagcagcgcagcaacagaattcatcggatatacatatcgcaccgggaaatccggttatgcttagaattgacggaaagcttgtaccacaaggaaatcaggttcttaccaatgttgagacggacaacctgctttctccaattgttccgcaggagcttaaagatgtgctaaagaaaaatggagagcttgattttgctttttcggtggagggcttttcacgagtcagagccaatgtgttcagacagagaggctcatatgcagcagcgcttcgtattctctcatatgacgtgcccacaccacagcagcttggaataccacagtcggttgtcgatcttaccacaaagatgagaggacttgtcctcgtgacaggagctacaggaagtggtaagtcgactacgctggcaagtcttatagatgtcattgcagcaagagattccaaaaatataatcacgcttgaagatcctatcgagtacctgcactcaaggaggcgctcgatagtggcacagcgagaggttggaaaggatacactctcatatgctgcagctctaagagcggcactgcgacaggatccggatgtaatacttgtaggagagatgcgagatcttgaaactatatctacagctattacagcggcggagacaggacatcttgtattttctacactgcataccaatagtgcatctgacgcaattgaccgtatgattgatgtttttccaccgcaccagcagcagcagatacgagtacagctctcaggagttttagagggaattgttgcacagcatctgcttccaatggtaaatggcggacgaattgcagcatttgaggtgcttcttgccaataatgccattagaaacctgattcgtgaggcaaaagcttttcagattccatctattatacagacctcaaagagagagggcatgatgatgatggatgactgtattttacagtattacagccagggtcttatagcaccggagactgcagtagcatatgcacatgacccggtaggcatggctagccgtgtgcatctttactattgatggtataatcgtatgtattttactgttatggtataatgttgtggagtcttaataaattatgatttaatttatctggaggttgcacagaacagggataaggaggagaagaaagtggctgactggacatatcagattatagaccagagcggaaaagaaagaaaaggaaatatagtagccgagtcagaagcagaggcaaaaaataagcttaagatggatggcaacatggtcataagcctcaccaaggcaacagcactgaccaaggaaatctcattcagtgtaggaggaaaggtaaagccgagagacctatcggtattctgccgccagttcaccagtatggtcaatgccggtgttacgattcttgatacgctggatatgctatccgatcagactgagaacaaggtcatggcgaaagctatcagaggtgttcatgccgagattcaaaaaggtgagactctctcggatggtctgaaaaaatatccgaatgttttccctgatatcatggtgagcatggttgcggcaggagaagcatccggcaagattgatgtagcttttaacagaatgtctgcacacttcgaaaaatcggcaaagcttaacggcatgataaaaaaagcggcagtttatccgattatcgttgtgattgtagctattgcggttgttattgtaatgcttgtaaaggtcatcccaagctattcagagatgttcaatgacctgggaacagagctgccgggcatcacaaaggcagttgttgcgatgagtgattttgttaccggatactggtatattgtgattgctgtcatagtagcaattgttatagccatcaagctttataagcagactgacagcggccagatgttctttggcaatctcgcaagaaagcttccggttttcggaaagctaaacatcaagacagcggccagtaactatgcgcgtacactttccacacttgtgtactccggacttccgatgattgaagcccttggtatcactgctgacaccatgaagaatgcgctttacaaaaaagccctgaaaaatgcgagggaagaggtaagtaagggtgttccactgtctgagccaattactgcgtgtggattgtttccacctatggtttcacacatgaccaaaatcggtgaggagaccggtgacttggagggcatgcttacccgactggcagactactatgatgaggaagttgagttggctacccagacagttatggcagctattgagcctatgattatccttgttctggcacttattgttggtgtgcttgtggcagccgttatggctcctatgctttccatgtatcaggctatggacagcttataaaatgaaaaaagaagcagactttgagtgtgaagctcaaaggctgcttttttggtgcagagacattggcagtaggacggggcttcatcccatgagccctggcttgtgcacactctctcgcgtgagctacgctgtactgcaaagatactgtaggaattatgctttatagggtatctatgcccgacgaaaccgtcgaaacgcgccgtccatggcgcggttctccttgagctcccatccgtgggagctcatttctgtgtatagtgtgcataattcaacagtatctaggcagctccgctattcgctcacgagagagagcgtgccacagccggtctcacgtgataaagccccttgcactgtggcagaatgcaggctgataggcgtgcagtgcagaaacagtatgaaaaagaaaaattatgatgacaaagaactgctgctatgctacaatcaacttaaagcattatatttctgtaagcggcaccacatgacagttttttacaggtgcacaccactttgaagagggcagaccacttcgcatcattctacaaaggacatggaagttttcaatgctttaattacccattaacagcaggaaaattgaaatgccgtatgtagacagaatacagaaagtgcagtcagaaggcagttagaagccagataatgtagtcataagacagatgaactgtatacagtgtgataatcataatgtaaacatatagaaaacataaagaaggacagcacatgtataccttgtaaactgtaccatcattggcaccggattttcctgctcacacaagagaacaggaggagaaggattgagcgcaaaggactcaatggcaaaggaatactttgcagacaatgccaggtttgcggatctgtgcaacaatgtactgtatggaggaagagaggtcatcctgccggaaaaccttaaggaaag

SEQ ID NO: 1623 - DNA, 974 bp, Unknown
  gut microbiota DNA sequence
atctatgtgtaatctcagtcaaggaataaaagaacaaggaatcgaacaaggacgaagagaagagcgaatttctacattggtgaccttcttcaaaaatgatggtactgtagctgcagcaaaacaaatgcttaattcgtcagatgaagacattaagattgctaaggaacgtctttcgatgattgaagagtaaagatacaagaaaacacctctattgcagtgcaatggaggtgtttttttgctattgcctaatcagaaagaatgtaataaaaattcgcagattattacaatctgcgaactttacctctgttaaaaacactagatatataataaaactttagtcattttatgtcaactattgtatctttttttgtatctttttacatttttaatggaatattgggatgtattttatatatttttaattttttgatggtcaaaattgtggtcaaaaataaattaaattatattgacattatatatccgatttgggtataataacaaaaaaagtaaccaaattggatatgcttttatgggaggtttgttattatgaacattaaggaaatacgaaatactactggactttcgcaacgcagtttttcaaagatgttcaatataccaataagtacattacaaaaatgggagcagggagaaagctcgccaacgccgtatattataaaattgattgccaaccagttaccgatagataatgataatatgtgtaaaattgaagataataacggtaagatttattattataacagagacgctgggtatttaattgattcaataggtacaaaaatcaagataggtgaagatcttgatggtgttaagaaaaaaaatctttcattatatgtggctgatttgtttgaatcctattatgaaatagttgataaatttaatcgtgactgtagacttgataaaactgaagatattatatggagttaatattcttcttcctataaagtatatatata

SEQ ID NO: 1624 - DNA, 632 bp, Unknown
  gut microbiota DNA sequence
agacatgtcaaaaagaggaaacaacatcagaaagagaaccgacggacgctgggaggggcgctactacatagtagacacagccggcagcaaaaagtgcaaatcggtatatggccacagctataaggaagtaacagaaaggctgcttacagcaaaagctgcttcacttaatcaaacagcagccccaaagcagtccgctatcaccgtaaaagcagtcgcggagaaatggcttgaaagtatagcatccagccggaagtgctctaccattcaaaagtattctactatatacaataaatatatcaaaccgaactggggagaaagcgtcatagatgagttaaatcagaatgaaatactcaaggagttgcctgagacagccggtgagagcgttacaaagagcatactttgtatattcaattcaatccttgcatatggagctgccacatatggcaccggagaaattcatctgtcgtacagggcaaaacgttcatccgtcacatcctcaaacaacataaatacaatcaatacaacagaccagcaaaagctaaccgagtatcttcttaccgagcttgatatctataagctcggtattttattgtgcctttttatggggctgcgtttaggagaaatttgtgccc

SEQ ID NO: 1625 - DNA, 4995 bp, Unknown
  gut microbiota DNA sequence
taatgtactgcaagcggagcggtactattttttagcggtacacatttattcgctaaatctacggcatgtttagcgaaaacgtttttcgactggttcgcaaggagaaaatcagggaagtggtagttgatatcgtccgacatttattctcccgtcggaggacgattggttatcaactatttgctaaatagaaggtttggcgaataaatgacgatattttttccgcggattaaattggttaaatagtcttggtttaagtaccagtaagggggctatgtaaagtaactaatttattccgcggttttttttatagggtgattcacatggaaaaaaaagaatattattcaaatttttttaaaaatataattagggatcgtaaaaatgtaaaaaattatgaaactaattatcagaatacttgttatactgcttgtttggagcgtggcgatgattatgacgatgaaatacaccgggaattaggttataagcttgaagcaagtaaagatatatatatatctgatttagaatgttttgtttcatttttttgtagtcgaaacaatattgattttaattttgaagattgaatttttatggttaggagaattaaaaatgattaaagtatttgagtgtttaggtgtccagacttttgagaaggacggaaaaaaaggaactaatatatattatagtgagccgtttgatgattatgaaaagaattgttcaggtgttaagtgtaaccacttgtttacctacaagaatattacagttccaaaaccgggtgagagattcaaggctatttattcattaggctttgacttcaaaaaccaacgtaacataccggtgcttgaggagcttgacatagttccgttcagtaaatagcgtgaattacctattggtatttacataataacatggttgccgggcttcggttcggcagctccccttaaaaaaggagatagaatgagtgaagatagtgtatatactacggagacagttacggagagtgttcaggataatgttaatcaagttaatagtgattatattgcactcggtttagtaggtgtgtttcttcttggttgtttggttgggcttttcgtttttcgtgtttttagctcgaggtggcatacatgattaataatgagattttcaataatttttttgaggttggcataattgggattgcaaccggatttagtattggctttatatcatggggctttggcttcgcgatttatagcattataaaatggtttaaaatggcctagcaacatcaggccggaaaggaatagggttaatggatatggagagtatttctacagctatgagcactgctttcggtaatgttcagactaatgttacttcaatgatcacaacttgtgcgccttacgcactcggtatcattggaactgtgcttgccgtaacaatcggcatcaaggtattcaagaagcttactgctcaggcctagtaattttgtttaccactcggagagtgggcagagatgcccgctctcttattttttagaaaagggggtaaatcctatgactaaattaaaaaaacgcgctacagccttgttattaggctctgtaacgttctttatggctttggctatgccttataacacaacacgtgtatatgctgttgatgtggctttttcgtgggttgttaatgagtcatccaatactatattgaattggatattgttgtatcttggtatatctgtagcgcctgaggctatttctgaaggaaaagtattcgataaaactggtaaatttgcaatggatttttgtaatgaattttttggtgatactttcgagcagtggtatgtttctaatggctttagtgaagatatagatacgtttaagcgtgagtttaatgatatattaactcaggattttgatgctgctaaatatgttgccggagatataaaaagttctgtattagatatagttaattcttatttaactagtggtgtttgttcagatatgagtatgtttgatactttcgatttttgtcattatgcatctaattgtttagaattaaatcaaacatataatttatattttaaaatgggctcttatgattcttatggtaaaccgtatactaatactgcttatggtaatgatgcgtatagggttacttcaagcgatgttagtcaaggtagtttttattgctttaatgttttttgtcaaaattctgattctacatataatgcttactgtttggaaactgcaccttttacattttctaatgctactgagttttataatgggttttattatcatgttactaattggacaagctctattaatttaaagtctttttattttgagtcaagtttgcctagtatgcgtgttaattctaaaattatagataatttatctgcattgtctaaagatggttctttttgggatattttttcgtctttgattaatgatagagcttttttccctaatattgatattcctgatgtagctgggaaagattgggcttttgatttggttggttggccaaattcttgggacattgataaaccggatgtgaagccgtgggataatgtcgattctttaccgattccgggtgatattgctattcctaaagagattccgggggttactgatttacctggcattatggatggggttgtcggtggcacaattccttggcctgatgttattggtgttgtaaaagatttgccagtagatccgactccggaacctgaacctaaaccggaacctgaacctgatcctgatccagagctaccggagattccggctgttcttcctcagggagtatctgacaagctaaaagatttaagcggtaaatttccgttttgtattccgtttgatgttgtagattgttataagtcttttgcatctaaagataatgcagaagcgcctaaatgggatatagattttaaagtaccgggaactaatcagcaatatcattttagtgttgatttagctatgtttgataagtatattcctatattccgctcaggtgtgttgattttgttttttataggtcttttgctagctactcgaaaattaataggttggcagattgataattagtgaggtgaatgtatatgaataaagcagtgtatgttttacttagtcaattagtaattaatagtttaatattggttgtgcttgctgtggcttgtaatttcttgcctgatagtccatttaaatcttttttaaatgctaatgcgcttgctccgttgcagccttacatgaaatatattaactggtttcttccggtagaagaaattatatgtattctcgaagtgtgggtagtgtgtatagcacaatatttcttttgggagctttgccaaaaaatattaaattctgtatcttccaatagttcaactaatgggttaacttctgttggaaagtagtggggtgatagtatgattactttgtattcaggaacaccgggagccggaaagtccttgcatcttgctacgcgcttatatcactggatgcagtttaaggatgcgcctattataggcaattttgcaacaaattttagctctataaaaaagcgtaagggcttttatatttacatggataatagcgaacttactccagataagcttattaaatttagtcaatattacagtcagattaagggtagaagagtaaaagagggtgaaatactactggtaatagatgaatgtcaaatactctttaattcaagagactgggggcagaagaaccgggctcagtggtgcgcgttttttactcagcatagaaaattgggctatgaagtggttctcgtggctcaattcgataggatgttagacagacagattagaagcctgatagagtatgagtggattcatagaaaagtttctaattttggtattcagggtaaattaatatctgcattctgtggtggaaaactctttgtagccgttaaagtatggtatccaatgaaagaaaaggttggcagtgaattttacatgtatcgcaagaaatatgcggacatatacgatacatatgcgctctttactgtaccggattgttagtgcatgggtgttatgcggagaggggctcgggggttcccttgccgcgtgacaccctcgcacttcgggcttgacagtagggggcaatgtgataggcttgctgtgcctggactgctgtatttcaagccgtcctggtgcagtaagaatatcacaattgccgggttcatgctgtcaagttcgtaattgcgtgggtgcatcatttatttattggtcttatgtaatagctttacaaaggctattttgattcgtctgcatcattttttttactcccctttgaggggttgggggtgattctaatccgtccttgttcggagtggtttcagactttctcggggaaagtcaacgacgaattggtctgggagctcgggcagacctgcgctagctgctcggaatggtcccataataatttttaacttaataatcatggtgggaaaaattcaaaatccgcctattccaatgggtggattttgtttcatttttgaacacattaatatattttttaatagggtgattctatggaatattattattgcaataaagataagtataataatattcattcgatagataatgttattattacttattttttaacttgtactttggattttgcattaggacatattaaaatgatttcagattgttcatcaaattattgggaaaagttaaatgtgtctaggtgttcacgatattgttattataacaatattattcattttgatgatggaatatatcttaaacttggtaaatatgggatgtggctagaagattctaagaaatttgaattgttaccaaaatttcaactggaagtaaatcctaataagcattttaaaaaggattcatttaaacgtataattgattttatcgaacattactgttcatcaggtaatcttgataagtacgattatgctatcgattttccggggaagtctgttgacgatatacagattttttcatcacgtaaggagaagggactt

SEQ ID NO: 1626 - DNA, 447 bp, Unknown
  gut microbiota DNA sequence
aagaatggctattgtaaaatatatgataagggaaaggaacagaaaacagatgatattattactcgtgtggagcatacatgttgtagaaattgtgagttgtcttttgaaaaattatatatttctgattccggtaatactgccgatttgtctaacattagtgctagtcgtagattattggttaaatcaattatacgacttcgagaaaatgggatagagtaccaggacttattggatgagcttgacagagctactaagatgcgtatcatgccttatatcagcaatacaaactatactgtttatgagtatgatctaaatatacttgatgatttattaagtcatatgagcgttttatttcattttgactatacagattcaaacggctttatgatgtttgatgattctcttgaagatttgccttttgattaatattttttattataacattgg

SEQ ID NO: 1627 - DNA, 535 bp, Unknown
  gut microbiota DNA sequence
ttatcgtcttttatcaattttatctgatatcttctttactagtaggtctctttcgtcaagagcctgtgttactaacatcttttcgctcataaaaaatcctcccttaaaaattatctcttaatataattctaagggaggattcatgtaatgtcattgaacttgtagttcaaaaattatgctgcatttaattctctcattttcttatagtaggtataaactcttctctcctgatccgtaagacatgcatccatttgactttttgttcttccagcatttccgcaaacaattgaatccataggaacttgaagcattttgctaattgcatacagattatcgactgttggcatactaacgccatccaaccatcgataaacactctgcacacatccaaaccctaaatattcttgaatatcttttggttttactcctctcatatccataattcttcgaagattaacacctgtttcttttttattaattgttggaaacatactatcacctcctagtataataatggtgtagtcaatcaagacta

SEQ ID NO: 1628 - DNA, 423 bp, Unknown
  gut microbiota DNA sequence
cacatttaacaatatattcaattacttattttctcctcctatatgtaaaatacgcgattctcttttctcggaatcacgtcaggataatctccatcgacatatccaagagcacaatgtcctattccctcatactcatcctcaataccgagtgatttgagaagctccttgccccagtcagactcaaactcttccttcgcgcggtgaatccagcagcttccaatgccaagatcatgtgctgcaagcatgagattccccatcacaagactgccatcatagacatgtgtaggccagtccttctttccaagaacgataagaataaccggcgcaccataaactggatcagtattacttcccattatgtcggcatttctcttagcgatttcatcccttatttccttgtttgtcacctgaataattatggtg

SEQ ID NO: 1629 - DNA, 220 bp, Unknown
  gut microbiota DNA sequence
gtaacagagagtacaaaagtgatgttttcagtatgctgatgcaggataaggaaagagccttacagctgtataacgcaatgaatgggtctagctatgacaatccggaggatgttgagatagtgattcacgatggcggcatttcactttcggtcagaaatgatgcatcgtttatcgtggatgcgagattgagcatatatgagcatcagtccacagtttgtcc

SEQ ID NO: 1630 - DNA, 484 bp, Unknown
  gut microbiota DNA sequence
gcatttcactttcggtcagaaatgatgcatcgtttatcgtggatgcgagattgagcatatatgagcatcagtccacagtttgtcctaataagccggtgagaagtcttatttattttagtgtgatattgtcagatatgctcagcgacaagaaaaaaggaacaaaaagtggcaagaacatctatggcagaagactggtaaagataccgacaccacattttgtggtattttacaatggtgaggaggaacagccggaggttcaggagcttaagctgtccgatgcgtttgagaagccgaccgacgagccgaatcttgagcttaaatgtaaggtgtacaatataaacgacggaaagaacaaggctattatggagtcctgtggctggctgaatgattatatgacatttgtaaataaggtcagagagtatcatgcagacggggcatttgatgatcttgctatagatattgagaaggctatagactattgtat

SEQ ID NO: 1631 - DNA, 247 bp, Unknown
  gut microbiota DNA sequence
cttcttggcccatcccactgtgtagttccaagatacagtgtgattgtaatcaccggtgtcagcttatcatcaagtgtaaagcctgacagaaactcgtccgaagacctgtaatccttatttttccggtgacgtttctttgcctcgttgacctgctctccataattcaatgcatcataaatcatagttttaacaggcatcgcataatgaatgtctgtctgcgcttctgctccaattaagataacataca

SEQ ID NO: 1632 - DNA, 1218 bp, Unknown
  gut microbiota DNA sequence
taaggttggaaacgactttacggacattttttatgcctattccatgaggtaagaccttgtcatttttggtagatgtaaattcaccattgttttctataatatttccggagtaggaattttcaataactatattcatatatgagccggtctgggtgatggagaatctgatccagccatgttcacactcagaggctgcttttatcgcattatcaaacagattacctattatggtcgtaattgaaaaatcgtcaatattaataccgggtgtatttatattaatttcacatctgatattttgtgactttgccttgtcctctttttcagctataagagctgagacgatatgggagcctgaatctacagcatttgtcagagaaagatcttcacaaatattatgaatatattcatgaattttcctatcattgtgctgtgaagcataaccatcaattactatcagatggtttttcatatcatgtcttaaagaatggagctgctttaatttatcgtcgagcttggcagaatattcctgttccattttgtcaagttccagtttgaaccgataatttgtgttttcttcaatgactgccagaaatttatcatatagtgaaatacatatgataaggaataaaaatataattgaaaaaataacaatcaaattataagagtttggattttcaatgcatattgaaagcgtaatgtagccaagcgacatacttaatcccaatataataattgtaaatgcatatgaataaaaatatgcactggattttctttttatattgttggtataaagtatgtaaatattataaacaactataaaaatggttgtggttttataatttaaatattcctgagaactcagtgcaaaatgtgcatcatttaatagtaaagtttgtatagtggcaattggtataaatagaaataatatagctatataattgaataaacatttcaacagtagtttgtttaatttcctaaaaattataagcatgaataggataggagcaaaatatgataatatcccgatagcatgtattgtggctggaaaaactacaaatactataatataaaataacttcatcggaatgctgattttattgtgcatattttcttcacatattctgaatagcaagaatgcattacaaagaagatataaaaattctaaaaaaatattaatgtaattattcataccgtgtctccttatgtttaatattataa

SEQ ID NO: 1633 - DNA, 177 bp, Unknown
  gut microbiota DNA sequence
atctctatcccatctgcatttttaaataacagcttatttcccgaaatacttaccgtgattcctgctgcaagactcagcatcattgttacaggcaccggccagtcaaaggtttctcccagtgctcccacaccacaggctgctgtatttcctgcaaaatctatcagagctgtttttcca

SEQ ID NO: 1634 - DNA, 729 bp, Unknown
  gut microbiota DNA sequence
gaaatgggcttcatatatcgtataccaatggaagtgtagaagattttgcaagtatttttgcagcacagtatgaggcaatgaaagcatccggagctttgggagaagacaataatcttacccaacaggaatttttggagcagttttataggcagggagaatttacccatgacagcagtaacccatttttaaactttgtttcgtccgtgttagatatcacaattatcaaacctgttatagagtcatgtattggagaagacctgataaccggagaagacctgacagacatggaacgtggacttaaggtggtctttgcaatggtggatttggttacgcttggaggagccattgcagcaacaaagttctcggaaatgggattaaaagaaggacttaaggcatttggaaaaacagctctgatagattttgcaggaaatacagcagcctgtggtgtgggagcactgggagaaacatttgactggccggtgcctataacaatgatgctgagtcttgcaacaggaatcacggtaagtatttcgggaaataaattgctgtttaaaaatgcagatggaatagagattggggcaaagacgctgagtgatgctgaggttaaaaaaatcggggatgtgttggatgaaacaacaaattctagctttgcaaataaaaatttgggagaagtgttaaaacaacagggattaacattagaagaatttaataagttaagattgacggatg

SEQ ID NO: 1635 - DNA, 735 bp, Unknown
  gut microbiota DNA sequence
gtggtggatttggttacgcttggaggcgccattgcagcaacaaagttctcggaaatgggattaaaagaaggacttaaggcatttggaaaaacagccctgatagattttgcaggaaatacagcagcctgtggtgtgggagcactgggagaaacctttgactggccggtgcctgtaacaatgatgctgagtcttgcagcaggaatcacggtaagtatttcgggaaataagctgttatttaaaaatgcagatgggatagagattgggtcgaagacgctgagcgatgctgaggttaaaaaaatcggggatgcgttggatgaaacaacaaagtctagctttgcaaataaaaatttgggagaagtgttaaaacaacagggattaacattagaagaatttaataagttaagattgacggatataaaggatttaacaaaggagcaaatcgcacagatgaaggcaatacgcgaggcagttccaaagatagatgctaacacttatattcaaaagacaataccggcttcggatatagacaagtatataggagaagatggatgggctgcaattggcggttatgtggcaagatatgatgatgtatcacacataaaaggatatgataatgttgtggagtcatcgcgactggattatgtaacaggtgatggtgtaagaccatatccggaaggtggagatgcttatggatatattaaatttaaaacaaaaagaacaaataaaatagagata

SEQ ID NO: 1636 - DNA, 229 bp, Unknown
  gut microbiota DNA sequence
cctcatccacatcaccaaacatatctgacagcttccttggaccatcccattcctttattccgagatatactgttatcgttatcaccggaatcagcttatcctcttttgtaaatcccgagagaaattcatcagatgttgccgtatccttttccctgcggtgctttttggctgtttcctttacctgattgccatatgccatgacatcataaaacatgttttttaccggaat

SEQ ID NO: 1637 - DNA, 210 bp, Unknown
  gut microbiota DNA sequence
tagtattctcaactacgttgtcaaggttgttgattgtgtgctcaagacggttctgaacagcaccgagtgatgaacgctgtgaagatactgttgagatagcatctgcgattgcatcgattgcatatgtagcatcctgctctgtatcagccttgattccctttactccaagtcctgcagagttcattgagtcgatgttgactgtaatcttgt

SEQ ID NO: 1638 - DNA, 439 bp, Unknown
  gut microbiota DNA sequence
gtagaagttttaaaatatgaatgcggaataaaacagaggataaaaggatatgaagaacgatgaaccggagataaaaccggcaaacaaaaatcctttaatggagcattacagatgaagacagcaatagtatatgcatcagtgcatcacggaaacacaaaaaagataattgacgagatagcaaagacaaacgatgtcgagctgatagatgcgacacagactgtagagaaagacttgtcggaatatgatttaatcggttttgcatcaggagtatacggaggaaagttccatcagtcggtgcttaagtttgcatcagtcaatctcacagacaataaaaatgtatttcttatctgtacatatggcggcagacctgtctttaagtcaattgagcaggtgatagcatacaaacatgacaccattgtcggaaggttttcatgcaagg

SEQ ID NO: 1639 - DNA, 183 bp, Unknown
  gut microbiota DNA sequence
aggcaccggccagtcaaaggtttctcccagtgctcccacaccacaggctgctgtatttcctgcaaaatctatcagagctgtttttccaaatgccttaagtccttcttttaaccccatttccgagaactttgttgctgcaatggctcctccaagtgtaaccaaatccaccactgcaaaaaccac

SEQ ID NO: 1640 - DNA, 185 bp, Unknown
  gut microbiota DNA sequence
aattcaccggagcttggatttttggcatactttacaaatatacttcagggtatgccgccatacataaagacagatgacagcgtatttaccattccggtgtcgtggtttttgttttatgcatttttattttttgtggtaggattttatccatcgtcagatctgtatggtgcaggcaaaaagacact

SEQ ID NO: 1641 - DNA, 725 bp, Unknown
  gut microbiota DNA sequence
aatgaattatacgctttttaaggcttgtagacaattttataaagtatatcctcaaattggttcgacagtgtcgagcgaatttaaattaccagattttgtaaaaagttcgacagtgtcgaacgaatttgtcacagatccagatgttttagttaataacttgtctttttcacatattcgagaaattatggttttaaatgatgcgtttgaacgatttttttacgaaacagagtgtatgaaatgcaactggaatgtaagagaactacgcagacagataaaaactaacctttatgtaagagccggcataagtaaaaaaccagagcttttattgaaaaaatctgttgataacgcaaatggaacaatgctatcaataaaagacccattcacatttgaatttttgggacttgatgcaagggatgctgtgtcagaatctgatttagaacaggctcttatggatcatttgcaggagtttatgttagaacttggagagggattctgttttgaggcaagacaaaagcggattataatagatgataaatattattttattgatcttgttttttataatcgtcttttacattgcaatgttattattgaacttaagaatgatgagttcaaacatgaggatttgggacagcttaatgcttatgtaggatattataagaaaaatgagatggcagaaggagataatccgccagtaggaatactactttgtacagataaaggct

SEQ ID NO: 1642 - DNA, 3225 bp, Unknown
  gut microbiota DNA sequence
tgagcacaaatgcaaacatctttacatagccgacaggtgtcatatggaatgaaaaccatccgctaaaggtctgaagcattatgcgccatacaatgtccattacttttgcaccaagcactacgctgatgatatccgagatgaccaccacgatggatgttgagaccagataaagacttgcaatttctctgttgtcgtagcctaaaatcttggtcatcgatatggctgtctcatttttctcgatgatgagcttcgtgagcagatatatcatgactgctgagagcagtatgcaaagcacctggaagtactgcatgtatgagcccatggaatggtcgagctggtctgccattttggtgatgtcgcgtatcgtaattgttgtcgcgatattgctctcatcgatatcctttatttttgtgtctgacaaaaatccgctgaatctgccatctgcaaaatcaaaggtatccgcgaaatgctctataggcataaataccgcgatgctctgggatttatcgtaggttcccttcaccttgaatttgtacgtttttttctcgtactgtgcatcgagctttattgtatcgccaggttttataccatatttatctgcaaatgaatccgatatgtacacctcgttatccttaagcgaatccatgtccttaagctttacgtatgcactgtctgtttccactccgtagaccgacacctcctcgtcaaactcatctgtccgccttaagagcgatgtcatgtcaaatttctctgcatcactgttgccggtttcaagcacgtttccgtctgcatcgacgtaggatttaagcacgtactggtattttgcaaacatcatatcatctgtatttttcttgtaataatcaagtgtatccggcatgcctactgccatcgcaagcattaccatgatgaaaaatattcccacaaaaagtatcagatagtttgcaatattctggaacatgattcgcagtctgaaacgactcatgaagctccagcgaggaagccgcattgcttttttgcgctttgttttcttaaggtcatggcgcaggaactgaagcggtgtgtgctgcatcatgcggattattacgataagatttacaaccagcatgataattaccggagcaagcgttgtttttatgaatgcgcccggattccagatagtatgatatgccggcaggctgtagctgttgtaatacatgcctactaccacatccttgaataccgtatagcccagtatatttcccacaaccgctgccaggaatgtcacgatgacaggcatcgaaaggtaatgcctgataagctctccctttgtgtagcccgacgcacgaagcgtgcctatcgctgatgattcatttgctatcgtattgcttatggtcactgcaaaaatgaatgcgattatcacgataagaatgtctaaaagcacgcctcccatggccttgtctgagcccatatcatccgtggcaaaattgattgccggattggagtaacgcggtgtgtagtcctccacctcattgcctgctgccatcacctgtgataccatcgcctccaaaaagtcatctgatttttccttctgctctatgtcgtcctttggctcatcctcgtatttccatgcatatgcatagtggatgctcttgttcaggcggtcaaagccctcctttgtcaccatcgccacatcaaactttattgcatcaaacatcatatctgtcttcttttcatgcagtgtggaatagttgacatatgcgataaggcccgataccttgaattcctttccgctgacctttattgcgtcaccaaccttcatgcccacgttgtctgcatgcattctgtccacagcgatttcgttctcattttgtggaaaagagccctcaatgaggcatgcaaggttgatatcctcggtcttagtgtatacacgaattgttccgtcctttttgccgtctgcattgtagtcctcagtctcgttgcgatagaaattctcgtagagcgtgacaggagttttgctgctatcgctgtctttttcatcccgggctgtttttacctcgcctgattcaatagccttaacaagctcgctgtcggccttatccttcagctcaaaatgtccatcctcctgcttatacttacttactccctcatccgcagaggtgagcatactgtcatttgccacatacattcccgatacaaagccgattgtcagcacaaggaaaagaaatacaacgagatatttcttccagtcaccgataatttcctttggtatacgctttatcagaggattttttatctttttcctgctcataggtcaaatcctccttaccactcaagctcttcggccgaaaccttatttgtattgatatcgttgtggcgcacggctccgtctcgtagctttatcacgtggtctgccatgtttttgatggcctcattgtgtgtgaccatgattatggtgtttccgtactttttgttgacatcctctatgagcttcaaaatctcctttgaggtgttgtaatcaagcgctcctgtaggctcgtcgcagagcagtatatccggatttttcacgattgcacgccctattgacacacgctgctgctgtccgccggatagctgatttggaagcttatagcggtgctcgtaaagccccagcgtgtgaagcagctcatcgatatccagtgcgttgtctgacaggtatgcgcccacctcgatattttcctttacattcaggttggcaatcagattgtacatctgaaaaacatatcccaggtgctttctgcggtactgtgtgagctttttctcactcatatccttcagcttgtcgccatttatgctgatatatcccgaatcggcgctgtcgatgcctccgatgatattgagcagtgtggactttccggagcctgacggtccgagcagcacacaaaactctccctttgccacggaaaaattcatgccgcgcagcacctcctggcgcgtctcgccgcttccgaagcccttttttaaatccactatttccaagaactttctctcttcttctgacatatgatatcctctctttcaacatttcaaattacatttaccttatataaggttatacgtttaaaaacaattattggtcagattgtacttactgtagttacctgtcgtttatgcatgttagcgttatctaactttatacattaagagtaacgctattctgcctttcttgtcaataaaaattttataatcagcttggtaattgattaatag

SEQ ID NO: 1643 - DNA, 189 bp, Unknown
  gut microbiota DNA sequence
gccctctatggcatctgcagctccgaatactgctgttccgcttcctactgctactgcaacgtcagctactattggtattgcagcacctcctgtcagcactatgcatgctgcacccgtcgcaattagtactgctcctccaaccgtcctccagattccctgtgtctttctcttttcggcttcatcctttat

SEQ ID NO: 1644 - DNA, 177 bp, Unknown
  gut microbiota DNA sequence
ctttggcaatgaaggtcaataaaaacggcaagtctttaaagatagatcagttatcggatggagaaaaatgcacgatagctctatttggagatttggcaagaagaatggcattggcaaatccgggtaaagatgtgaatcctttggaaggctcaggtgttgtgctcattgatgaattgg

SEQ ID NO: 1645 - DNA, 13039 bp, Unknown
  gut microbiota DNA sequence
aaggtcttcaattttcattgaagcgttctgattgattctcaaaatctttcaaggtttctcactgttcagttatcaatgttctttgtttgctttcttgcgacagcttgattattttatcaaatcgctgttcgtttgtcaagcattttttattttttgaactctgttttaagttctctgtcttgcgacagcttgtttattctatcaaaatgtttttcatttgtcaagaacttttttcataactttttcagcttattttcaaagcagtacttataaagtcatgtctgtaaattgtaactcacaagctctacaactcaatgtgtcccgcgagtcagctttgatataatatcatcccggcacacatatgtcaacggatttactgcaattaattaaagtagtaaaactatcttaaaaaacataaattttctaaattgtctgtttattatatacaattctcgcaattactatctgacagcctctatcgcttccttgatatttgccacaccgacaatctcaattccactgatatgcgacactcctgcaagacacactttgggaacaatacactttttaaagccaagcttctttgcctcagccacacgctgctctgacatggtaactccgcgcacctctccgcttaagcccacctctccaaagcatatggtatcctcacgcactataatatcctttttgcttgatgcgattgcaagcactatcccaaggtctatcgccggttcgttcatccttataccgcctgctatattcacataagcgtcacagtctgacagcgacaggttggctcttttttcaaggaccgccatgagcaggtttactttattataatctgtaccatttgctgtacgccttggattattaaaaaagctgtgacagacaagagcctgtatctcgagaagtatcggtcggcttccctctatggaacatgtgacaattgatcctgatgctccctcgggcttaccgctaagcatatactccgacggattttccacctcaacaagtccctccgccttcatttcaaatacgcctatctcattggtcgaaccaaatctgttcttaacgcctctaagtatcctgtacgactcatatctgtcaccctcaaaataaagcacagtgtcaaccatatgctccaacgtcctaggtcccgcaaccgcaccatcctttgtcacatgtcctactataaaaacagaaatacccagagtctttgcaagctgcataagcactccggttgtctccctgacctgtgagacactgcccggtgcagatgatatctcttcgttatacatggtctgaatggaatctatcacaacaacctccggtttttttcgttgaatcacgtcctttgctatatcaagacttgtctcacataaaagctccagcgaatccgtaaaatcgccaagtctgtcggcacgcatctttatctgatgcagggattcctcacctgacacataaagtaatggcacctttttctgcgaaagctccctgcatacctgaagtagaagcgtggattttcctatacccggatctcctcccacaagcacaagtgcccccctcacaattcctccaccaagtactctgtcaaactcggctatacctgtcactatacgctcctctttctcgctttttactgccgaaagaggcagaacctgtgccgcctttgattctttttttacttttcccgacgaacttatcgactttttatctacggtttcctctacaaatgtattccattccttacaggccgggcactgtcccatccattttgccgattcataaccacattcctggcagaaaaatacagaggtctttccttttgccatattgttctcctttataaaatacaaaaagcccggctttcaccgggctaaaaatatgctctattttcttgatactttgatatcgactgaatcaacaccctcaagctctacgcttaagctgagcttgccgccgagatttgtcttcatagtacctgcaacagctccagctatatcaatttcgtactctgtctcctcttcaaggccaagagtaatctgagcatcctcaggtccctccacagtaaatgtcactgtatcagcagtctcctcgaaatccataaccgctgttcccggaacagactcgtatacaaagagtccgtttctttcgagctttgtaatctctttgaaggtctttaccttgtagatatctccatccttctcaaaattatcaagctttgcctttgcagccaatgtataatctccgaagctgagctttccgttttcctcagtacgaatcaattcacttattacagccatttttatcctcccgtagctatatttgatatattaattataaatctaatgctactcaacagtcaatgaaatttgtttgtttttcgtagaaattattaccttatcacctcgcttaattttaccggtaataatatcctctgacatacggtcttcaatctcctcctgaagctttcgtttaagaggtcttgcgccatattttctgtcataggctttgtccacgataaaggattttgcactgtcgcgcactgtgagctctatatcaagccgttctttacagcgtttcttaagctcatttacaagaagtgtcactatatgcttcatgtcatccttgttgagagctctaaatacaatagtctcgtcgattcggtttaaaaactcaggtttaaatatacggcggacctcctccatgacactgttcttcatacgctcgtgatcctgcttttcatcctcaccagcgccaaagccaaggcgctttggttctataatagaagaagctcctgcatttgatgtcatgatgattattgtattcttgaaatcaaccgtgcgcccctgtgaatcagtgattctaccatcatcaagcacctgtaagagtatattgaacacatcaggatgtgctttttctatctcatcaaacagtataacagaaaaaggattgcgtctgaccttctctgagagctgtccgccctcctcatggcccacatatcccggtggtgaaccaatcatctttgaaacactatgcttttccatgtactctgacatgtcaacacgtatcatggcatcttccttgccaaagacagcctcagcaagcgcctttgacacctccgtcttacctactcctgtcggtcccaaaaacaggaatgagccaatcggcttcttaggatcctttaaaccaacgcggcctcgtctgactgcctttgcgacagcagaaacagcctcctgttgtcctattacacgcttgtgaagtatctgttcaagctttgcaagtcgtcctgcctctgactctgtaagcttatttacaggtattttggtccatcccgatactacatccgctatctcattttcgccgactacaggctggtttttggctcctgtgcggtgattcttcctgataagcttctgctgtttattttcaagcacttccttttctgacataagcgcgccggcagctgcgatatctcccttcgacaaagcatcttccacccggtcctgcttatctgttatctcttttttcagagcaagcagctcgtcagatgatgtcaaattcttaagccttatcctggctgccgcttcatccatcaggtctatcgccttatcaggtaaaaatctgtcatttatatatcgtgcagaaaggtttactgctgctttcacaccctcatctgtgatgatgacaccatgatgcttttcatagagtccctttaatcctgtgagtatctctattgtctcatccacaccaggctcctcaaccatcaccggctggaaacggcgctcaagcgcagcatctttttccacgtatttgcggtactcttctatggttgtggcgccgattacctgtacctcgcctctggcaagcgcaggctttaatatgttagatgcatctaacgagccttctgctcctcctgcacctattatagtgtgaagctcatcaatgaaaagcagtacatttttggcatttgaaacctcgcttatcaccttcttgattcgctcctcaaactcaccacgatactttgatttggctacaagcccggacatatctagagaaaccagtctctttcccaaaagaatatccggaacattgccactgactatatcctgtgcaagtccttctactatagcggtcttgcccactcccggctctccaatcagacatggattgtttttgccacggcggcaaagtatctggataacgcgctccatctccttttttctgcctataacagggtcaagaagccctgcctctgccatatctgtcaaatctctggaatactgatctaatacaggagtcgcagaattgtatgatgtactgtagcttttcatcagatccctgtatgcagacggatcctcacccatcgcaccaagaatatctataaacatcttctgactgttaacacccatggtgtttaaaagtcttgcagctgcacagtctccctgcagtactatagccatcagcaaatgttctgtacctatctcattgcactcaaatctatcggcttcctccgatgcacgctccaatactctctgtgtccttggtgaatagccatccctgtccatcacttcgatgttatcccccggtgaaatcaggtcttcaatcatcgaaataagcttatcatattccacattgcaggctgttagaacctcagctgccacaccggtgccctcttttataaggccagccagtatgtgctctgttccaacatagctgtaattcattttctttgatatacgtgcagccaaatctattgcttttttagccttacttgtatatggtttcaagtcatatcctccagtcatattcactaatttaagtcgatgaactgcaaatcatcatcttcgctgtcatcttcattatcatcctttgcactgctgtctatagtctcagacggcttatttccatcattgacaaagccatcaagtgccatttgaacctgattcttcaaggtatcatcatcagcatcgttttctgtgtcagaaacgttttcctgccttgaatcgtcttttaaatcaaactcagagttttcattctcaacagctttcttagaatcaggtgtaatttctacggttcttccgacataggatgcatttgatatattttcatccgtagccatcttttgctcatctgcagcaccttccgctgtttcttctgcgacttcatctgccggctcttctacagcttcatctgctgtttcttctgcggcttcacctgccgactcttctgcagcttctcctgccacttcatccaccgactcttctgtaacctcttcttccagctcatctgctatctcgtccgcagtttcatcagttgtttcttccaaagcttcatttgatacatcttctgctgcatcatctacatcatcatcgtcatcatgatagtccattgccttatattttctgtttttcacagctgatacaataagcaacagtaacagaataatgataataagaaccagtattgcagctaaaacaagatatttattggcaattcccgggacaagctcactctttgttgtatcgttttcctcctgtgccactgtaggtgtaccaagctcggttctcatatatgtgccatctacgctatcatatgtataccagccactctcaccattgtcatttatggcatatacgaggtaaaaatcctttgtctgatcatcggttttttcggctttggtctggtaggctgttgccacacccttgccctctatggagagtgatacctcattatatccctcaggcacatcatccaccttaggcagtaaaaccactataaaatgcgactctgaattgatacgaacaaactcatatgctgcattctgtgctgcatcatatacaaaaagcccattgccgctttccgactgtaaatacacaagtgtgatatcaccaaaagtgccatgaagggtattatattcaagaccgtcaatcactgtctttgagtgctcaaagccttcagggacaacatcctccggaatgtcattgaccatagtccactctgtgccatttatatcgaacttcttccagttatcctgcttatctgcattctccggatcatcctcggttcttctggtaacaactatattgtatgtgcttgtgctgccgtcctctgctgtcacaacaacgcttaccgtattctctccaacctcaagtgaatcattgcctgtgacagatgtcacacttgccttggaatcagccggatttgctgtaaccgcaaggcttgaacagctgtaatctactgtagctgtgtaatcctttgtcgcagcagaaaactcaggggaaagcgtacctgctgagataacaagtgaaccaagagatgcgtttgaggatttcttttcctctttgttttcattatctttattcgcattgttgtcattgccggtattgctgccggaattgtccttgttatccttgttgctgtttgaatcattgtttgatgaagcacttgttaccgtcaccttcgtgctggcaccggtaattgtacctccggcatcgttgccctctgcatctcctacaactgtacaatatgcctttatagtgcagcttcctgcagccttcgccgtaaatgaaaatgactgcgatgtgggatatcctgcggcgtcaccaatattggccacaccatctcctccgttactcagtactccctcgtcagagcttgagataactacagtaccaaaatatccagacggcatggaaacagtcaccttaactgtttttccaacagctatagagcttgagctgacacttaatccaagtccctgcgcatatacatgctcggcaggtgtgaaaacaagcatcaccgccacaacaagtgataatatacatccaaataatttcttcatatttttcctcacatttctaattctgcgatatctttgatttgcccagtatgtgtctgttcatgattatcatatcaagggcatttccaccatcacgctttctgttagcatcagctgcctccagataagcacctgtgagtgttccctttcctaaaatatgtctgttgagcttaatcatatcaagagcatttacagcaccatcaccattgatatctccatatataacaatatcgtatgtctttttcagattacctgaagcatcataaacagccactttattgcctgttgcaatctttccgctgttttctgagcctgagcttgtcagaagctttacagtacctgatgctgatactgctatattcttcacaaaatcagctgcaccggttccaggctcaatgcctgtaatataagtacctatactgtatttacctgatgttatgtttacatcagtattattttggttattattgttctgattattattgccacctgcattatttgcagatgccgcctgcctgtttatattgatagtgtatgttcttgtatcaccgctttgcgacttgcattttaccttaattgtattatttccgacagcaagcgaatagcttcctgtgcctgaaacaccactgtttcctgaaactgcatttgccgaaacagtcactgagcttatagcatttgaaacaactgctgaatagcttgttgtcgttccattgaaggccggtgtgagtgttacaccgcttatcgcaagcgactgcagatagttattggtatcgccggctttattaaagcctactgctgacgatggcatattgttgtatacaggtattttaaatacaaaagcctgattcttgtctgaatatcctttagccagactctgtccctcagtaagagccgctgtggcattgcccatgtactgatggaaatacagcgagcttgtatttactacattaaacttctcaaaatacagtgtattttgacccttatttatataattgctgcccacctttacagctccgccgcttatggactttactcttgtattccagccctgcttcttggcaaaagacagaccatttttataaatctgtgccttcgtgtttccggttgcactaaaattaaaataattataatatccttcgtatccagaatatgtacccgaaataagagggctcgttcccttttgcccctgctcctgctttatgcgcgatgctatatggtatgcacttactccactgctctttgccacatccatgaatgtgcttgcataattgattttctcaccattgttggaataggtctttgttccctccataaatgtgccttttactatagacttgacaccttcaagtgcctcatttggactgtatgcaaggctttggaactgaaaaatattggtctcatcaagaaaattccttggatccatgagataagcaatataggcactgcttgctgacacccatcccggttcgtactcaacccacgtatttgttgaccagttatatgctccggcagctgtggatttcttggcattgtctgctgatttggataccagattaagtccgtttacactttcattttcaatcaccgtatcccaattcaaacctgtatttacagcctcaaatgtccagcttggatacttattgtgaagagctgtaaggtttggaatatagctgtcaggaaagcctgcattcttcatagccgtgacaaaatcagtattgtctccgctattattgtatgtcacctttatgtatgtactgatagtccagcccgtaaatgccttgccgtttaaagtacccttgacattgtaccagaccacaccgtttaccctagtctctcctattatgtcaacctgatggttccagttgagtgagacaaccttggtagtgccggatgtgcctgctgcattgcggacatacacattgccacctgtaatcgtacctgtagcatatgctcccgatgcggttgcaagggcaagctgttcctcattattctgctgtatggcatccgcattgccggtgtctgccgaagcatcccctgtctgtgcattgtctgatgcagctgtgccggtacctgctgatacaaaatcagacctgatatagctgacacactcctcgttatttgctgccagattgtactttgccttgtaccacaccttgccgtctgcacctgtggtctgctcaagaatagtaatatccttgccgtttgaaagcttgtgctccagctcatactctgtgcccggtccgcttctcgccgctacccagtatctctcatcacacacaaccttagccgcctgatccgcatagactgctatgctgctgtatggtgccaggtcacatgcggctaatgacaatgtaactacagaaactgccagaaatttatttatctttatcatcgaatcccatctttcttatgtgcattgtttacattaatccattatccatttaattataatagaatatggcctttgtatcaatgtattcggcagaaatttattatttttttattaataatataaaaactcccttcaacgtgcagctcatgcttacgtttcagggagttgtcttattcatattctgcttattcttactgtgttctgtcgctttttctagctgaacagggattttatcttatcccataaatccatgaaaaagttaccaagcttttcccagaagcccgggtcatttatcttatcgccaagctttgatgcccagtcctgtgcctggttgatgactgaatcccagtcgatattggcatccttaagcttcataagaagcgatgtcagctttgcaatatcatcatcagaaagcttcaggtcgtaatcctttgcagcctcctttatcgcatcctttatctggctctcatccttgagccttccatcggcaagctgcttctttaggtcagcaatcattgcctcgatatcctgcgaatcgccgtcaatgctcttgttaagctctcctgttgtgacaagctcatccatcgctgcgtctgtcaccttgtcgtcaagcttcttgcctgtcatctcctcgtatgcctttagtgtgcctacaagtgctgccgttccggaaatagggaacggtcctgcgactatgattttagcatcagctatgcctgctgtggcaagcgcattcttgtacattcctaccgtacagtaattgatattgtgcgtggaaacactaagacccgcaccctttttatcctctgtaatgagtactgaggaaagtgaccttgtgccaatctcgctcttgctgatgtatgaatcgaggtacttgtgctcctcatcattatttacatagaccacatcgtatttgtccagatcagtgagctcgattcccataaatccaagcactgtcgctctctgatccggtgtgaggtctgctccaagacttaagtatggcttatcattattgctgatggtcaccttgtcgtttgcctcactgccagctgtcgttgtgctgtctgcagtactgtctgtgttactcttatcagctgcgtcactgctgtcactgcctgatacatcaacgcttgaaactgtatcagtctgcgtagctgtctctgttgcaaatacagccggattcatcgtaaacagtgtcaccgcagcaagcacgctacatacaatactctttgcttttttctttattaatctaatcatttttcctccaatctactgctctatatcatacgaaattgtaaagttacttccgtcgaagctgacatctgccatgcttccgcataccacaggcatcatcggtgacatatgacctatatccagatccatgatgattggcacattaaactctctaagcagtgatgaaagcgcctgtctgtggtctatgccaaacatttcctctccgaagtgcgccgggcgtccgataagaaagccctttacatttgaaaaccatcctgcatttttcatctgccacatagcccttctcatgcccatcacattaaggtcacaagcctcaaggaaccatatgataccatcatcactgtagcgctcattaaattcccttacatggtcaaacgatgtgccaagcagattgataagacaatccatgcagccaccaagcagcctgcctctcatggtaagcctgcttccctttgccaccgcaggaatagagctgatgcacgacttttcagtcaggttgtagcccacaaacggagcattctcatcctttatcgattccttctcccacatagggtaattggtaaatgaaagcttcctgccacaaagcagattaaatgcatcggtaagtgactcatgccacacctccatgccaaagctgcccgcacacggcccgtaaatacctgctgtatctgcaatagtagcctccaaaaatgtgaaattcgtgttgtcggaatagcccatgtaccatttcggctttgactgcttcacgcgctcaaaatcaatataaggcactacctcgcacatcagctcgccaccaccacaggatataagcacatcactatcagcagaagcatagctctcgttcagctcttctgcgcacttcttaggtgtattgctgatacctatgccactgtcgcacctgcagttaggtccctctatcgtcttataacccatgctgtgaaaccttttaatggcattgtcaaaggcactcctgtacggctctgttgtacagcccatcgagggcgccacaaagcctattgttcctctatcctttagaaattcagggtatctcatgtttctatcatcctatcactattatttacatatctaagcttctgtctgaagtaaaatatgtaggattttatcatttctgtcaaggtcattttactgtcataattaaatgtcgtcgtgtactgcacatgctgtctgttgcaccagttgtatatatcatgcagacttatcgaatcaacattcttcatattgttcataaacaccttaacctttgaaagctcatcctcactgtcaatgtatagatgaaagatagtattcggacattcaattattatctgctgttcttctatatttttcatcactgtatcctctattgaataatgtatcctgtgtgattaaaaatattatcgtctgtcacaccgggatgtgagtaataacaaaatatcgtaactgttcagtgccttcacagttaaaaaatatcacataaccatagtactacaccggcgtcacaaaatccagtcatttttgcctgccaattcttactattttattaagaaaaacggtaaatattatactccctcacagtcaaatgccggaatgaagctgtcctttgccacgtcaccctcctgtataaatgcattcgtgattcctatttcgagggcatagtcaacaagcctttcatactctctccttgtcactgtgcggtttatctcaggataatcctttagtgcaatcggcgtaaactggctcatcatgcttatatatacgtgatcatgatatgtatcatacaggtacttaagtacagcctttgcatcattcacatgtcccggcagtagaagctgtcgcacaataactcccttttgtatgagtcctgtcgcatcgtcaatcacgacatccggctgctgcctgaccatctctgaaagcgcctgctttgcgacagacggataatcttttgcccttgaataccttgccgaaagcgtactgtccatatatttaaaatccggaagatacacatccactataccctcaagcagctttagccctgtcacattttcatatccgctcgtattgtatataataggaagcttcatgccgcggctttttgcatcgtttaccgcccacactatatcagggatatactgccccggtgtgaccagattgatattatttgcgcctttgtcagcaagttccataaagatatcactcagccgctctttactgattacctttccctcttttccgtcagaaatctccctgttctggcagaacacgcagtgcaggctgcagcctgagaaaaaaactgccccgcttcctctttttcctgatatgcatggctcctcccaataatgaagtgctgctcgcgccacctttatttcagatgaaacgccacatacacctgtttgtccggttcttctgtttgtgccacattttctgggacacaataagcaattttcgtatttattcatatttttcattttaacccttgctaaaaataatgtttgatactacaatctatatgattaaagggtcaaaaggtattgtataccttagtgacccgcact

SEQ ID NO: 1646 - DNA, 3163 bp, Unknown
  gut microbiota DNA sequence
aggaaattagcggatttcgaggtgtagtcagattacgggaatgcgtagcatgtagtaatctgattaatcatcattttataattatatcataactattcttacagaagaaaatagttaaaatacacaataaggagattacaatgaatcagtcaaactgtatcgtcgcccagtcaggcggcccaactgttgcaatcaacgcaagccttgcaggagtcatcgcaggagtaaaaagctctgagaaatacgatatctgctatggcgccgtaaacggaatactcggcatattaaatgagaattatctcaatctgtcagatatttttgcagatgaagctaatcttgaaaagcttaagaccacacctgccatgtatcttggctcatgccgccacaaactccctgattacaaggatgatgattcaccatatgtatacatcttccaccagttcgataagctttctataaaagctttcttttacatcggtggaaatgattcgatggataccgtattaaagttatccgattatgcaaaaaaaatcaacagtgatgtgaaaattatagggattccaaaaaccattgacaatgatctgtgcatgacagaccacactccgggctttggctctgccgccaaatatatcgcatcaagcatgcttgagatagcccatgatacctttatctatgctgttaagagtgttacaattgttgaaatcatgggacgtgacgcaggatggctcactgccgcttccgctctcgcacgtaatgagtacaatacagcgcctcagttcatatatctgcctgaggtggattttgacaaggacaaatttgttgccgatataaaagaagcccttacgcacactaacaatgtaatagttgccgtatccgaaggaatacatgacgcagacggctcatacattacatcatcaaaggccgcatgtgaccagttcggacaccagcagctaagcggtgccggaaaagctcttgagttcatcgtaaaggaaaacatcggtgtcaaggtgcgctcagtagaggtaaacgtgctccagcgctgtgcctcacatcttgcatcattaaccgatatcgaggaatcttttgctcagggtaaaaagggtgtctctattgcagcagagggtgtgaccgcatcaatggtatgcttgaagcgcatctcaaatgatccttatcaggtggaatacacatattctgctatcaaggatatcgcaaacgaggccaagtctgtgccaagagattggatcaatgatgcgggcaatgatgtgaagcctgagcttatcgaatacttaaaaccacttattcagggagaaaccgctgtagcctacaagaatggtctgcctgactatatggatgtgtcacatcttcacaaatgtaactgattttagctgccgcatacaccccgatgtaggcagcaacagcatatctccaaggaggtcgatttacatgaagaaaaaagtgcttataacctgcgccgttgtgcttggtgtgcttttggctgtttatcttggctttgccttttattttagcagccactatctgttcaacacaaagattaactctgtaaaatatgcagggaaaactgcaaaagaggcattagaaaaaaatacagccctaagccgcgactatctgctcacaatcactgatagaaaaggcaacagcttttcacttaagggacctgatttttcctatgaatatgtctcaaacggtgacgaggagcaaatcctaaaaagtcagaatgcttttacatggcctgtcagtctcttcaaagctcaaaactatactctaaagggttcgtccaaatatgacgatgccgctttggcggaaaagctcaaggctcttgatattttcagtgatgactacattgaaaatccggaggatgcccatatcgagataaaagacggcgaatacaatgtgattgaagagaaaaaaggctgcaagccgatatatgacagcatccttgccgagataaaggacgccctggacaacgagcttccaaagcttaccttaagtgatgactgttatgaagctccaaaaatcacaaaggaaagcgatacaatcaaaaatgaaaaagaagccctcgacaaatacactgcttcaaccgtcacttacaaaattgaaggtgccgacgagaagcttgactcagccaaaatccttgatatgctaagcatctcagatgacggcagcgtgagcatagatgatgccaaggtcactaaatatgtccagcagcttgcttccaagtacaataccttcggacgtaaacgctcattcaagacatcgtccggtgacactattgaaataggtggtggagactacggatgggtagtcagcaagaaaaatgaaaaggctgaacttctttctgatttagagggaggcaagcccgtggaaagagagcctgtttacgagcagacagcactccatcgcggtgctgacgacataggtaatacatacatagagattgactacacaaagcagcacatgtggtattacaaggatggtgctctccagatggagtctgatttcgtatcaggtaacctcgcccgtcagaatggttccgtagatggtgtatacaagattgtttacaagcagagaaatgctactcttgtcggcgagggatactcttctcctgtcagctatttcatgccgtttgcctacaatataggtatccatgatgccagctggcgtgataccttcggaggaacaatttacaaaacctcaggctcacacggatgtatcaatgtgccacctgcttttgcagagcagctgttcaacgctgtggataagggcactcctgtcgttgcctactacagagaggctgtcactctgacaaacaatgctgcaaagatgtccaatgcatactcgtatgtagctcctgatgctgcgcaatagatgtggattgcttggtatttttcaataatacgggaagacgaccggcacacggggaatttgcccccggcagaggtgctcccgacgagctaacgctacgcagctaagatactgtacaaattatacttttttagggtttctatacttgacgaaaccgttgaaacgcgccgtccatgggcgcgttttctccttgccccggcgtccatgccggggcatttctgcgtttcatgggcataattctacagtatcttggcagagtagcgtagcgaacgagagaacg

SEQ ID NO: 1647 - DNA, 36502 bp, Unknown
  gut microbiota DNA sequence
gtcactccggcggcttacgccccgtatttccatagccctatgctatgcaaactggctattgtagaggttcgcataaaatccgtccgctgcaagcagactctcatgattgccctgctctataatctttccgtctttcataacaaggataatatccgcttccctgatggtggacagacgatgagccactataaagctggttcttccctgcatcatggtaaggaatgccttttgaatcttaatctctgtacgtgtatcaatcgatgatgtagcctcatccaatatcagcataggcggtaagcagagcatgactctcgtgatgcataaaagctgtttctgtccctgtgacaggctgccaccgtcctcaccgatttcagtatcatagcccttcggcagacgtctgataaagctgtgggcatgggatgcctttgctgctgcaatgatttcctcatctgtggcatcaggctttcccattatgatattgtcacggattgtgcccttcttgagccatgtctcctgaagcaccatgccatagttgtcacgaagactctctcgtgtaatttttcttatatcgtgtccgctcaccttaattgttccactgtttacatcgtaaaacctcataagcagattgataatagtcgtctttccacagccggtcggacctacgatagccacgcgctgtcccggctttacgtggagattgaaatcctcgataagctttttatccggcacgtatgagaaataaacatcctctatgtccacacgtccgtctgcttcaccaagcgttaccgcatccgaagcatccggtatttccttttcctcctcaatcagctcgaaaatacgagcagcacaggcaagtgcgttctgaagctctgtgatgacacccgatatctcgttgaacggcttggtgtactggttggcatatgataaaaagcatgaaagctgtcctaccgtgattccgccggtgagtgcactcatggcaccaaaaattccgactccggcatacacaagactgttgacaaaacgtgtactcggatttgtaagacttgaaaaaaatgttgccctcagtgagcatttctgtaatctgtcatttatctcgtcaaactgctcaagcgcctcatcctcatggttgaaggcctgtacgaccttttcatttcctactatctcgtcgatgagtgatgtctgctctccccttgttcttgtctgcagctgaaacatggaatatgtctttttagtgataaagcttgccacaaaaagtgacaaaggtgtgattagtactacgatgcatgatattttcacatctatcgtgagcatgaaaataagcgtgcctgctattgttgcaattcctgtaaagagctgtgtgaagcccatcagaagtccctctgaaaatgtatctacatcggcgatgatacggctgaccatatcaccatgtgagtgactgtcaatatatgataacggcattttctcaatattcaaaaatgcatcatgccttatatccctcactatgttgtaggtcatcctgttgttgcagatatttgtaagccactgggccgctgccgctatgacgactattattgcagctcttgtgaggatggctgtcatagccgtaaaatcaaccttttcttttcctacaatcaaatcaattgcgcgtcctgtgaggattggaaaataaagcgtaagcgccactgtaacaacagacagggcaagggaaattacaagcaaaggaatatatctcttcatgtagcttagtaccttgcgcattgtacctgctttattcattttcgcattatccatagccatactctacacctccttttgtttagtcatatccgactcttttttaaactgtgaatcatatatctctttgtaggtctcgcatgtctcaagcagcttttcatgcggtccgaagccaaccatctgtccgtcgtcgagcactatgatattgtccgcaaactggatagatgaggtacgctgtgacacgataaatattgtcttgtcaccatgcatgccctttaatgccgcacgaaggctcgcatctgtagcaaaatcaagtgccgatgcactgtcgtcaagtatcagtatgtcaggattctttacaactgccctggcaattgtaagacgctgcttctgaccacctgataagttcttgccgccctgctctatcatgtagtcaagaccgccctctttgccctttacaacctctgtcgcctgtgctatatcgagcgccttccacatttcctcctctgtggcatcatttttgccccagcgcaggttgtcggctattgttcctgcaaaaagcactgccttttgcattacaacaccgattttatctcgaagctgcactgcatcgtagtcatttatatcatttccctgaatccttatagtaccctttgcggcatcataaaacctcgggataaggtttacaaggcttgattttcctgaacctgtaccaccgatgattccgattgtctgccccttttgcactgtaaagcttatatctgtgagtgtctcatcggccgctccctcataggtcatgcagacatggtcaaactcaacctcaggtgcccctgcctttgcatcaatgagcttaggatttttctcaggaagctttgatggaatagaaagcacatccgctatacgattaccgcacgccactgcctttgtcacctgtacgatgagatttgcaagctttatcagctcgacaagtatctgtgacatgtagtttacaagtgccacaacctcaccctgtgttaggattcctgcgtatacctgtttgccgcctgatacgataactgcaattgttgcaatatttataatgataaatgtcagaggattggtgagtgcagagattcgtcctacaacctgctgcatattggttaaaagctcgttgtccctgttgaagctgtcaatctcatcattttgcttattgaaagctcttataaccctggttccctctaagttctccctggtgtgcgaaagcactgtatcaagagagctctgcacctttttgtaaagtggaaggcttgcagccataacggagaataccactattgaaagcagaggtatggtaactacaaaaaccattgccgctcttacatttactgtaaaagccatcgccatagctccgaacacaataaatggcgaacgaaggaagagtcgaagcaccagattgactcctgactgtacctggtttatatcgcttgtcatcctcgtgataagtgtcgatgtgcctactgtatccatctttgaaaatgataatgactctatcttttcaaacaatatatgacgaagctttgttgaaaaaccgactgccgccttggccgcaaaatactgagcaatgaccgagcttaccagaccaactgccgcaagcagcaccagcacacctcccatcttccatatatatggcttgtccgaagccgcgattccgttatcaatgattgctgccatgacaagcggtactataagctcgaaagatgcctcgagcagcttaaatagcggagcacagatgcattcctttttgtactccttcaaatactttaatatctgtttcatcttttccccttccagatttttgttactgtttacgtctctgtatgaccagcaacgattacagcttcactattatagatgatttttctcatatgtacaagaaaaacgatacacaaaaaaccacaaaaaaaccagcaccctgcggtactggtttcataagtcagctcttatgtatatgcttcttgattgcttcaaagctctcaggactgatgacatgctctatccggcatgcgtcctctgctgcaatctccttatcaacaccaagcttctcaagacactctgacaaaagctcatgtctttcgtatatcatctctgctatctgtcttcctgactctgtgagtgtgataaagcctgcatcactaactgtgatattgttcttctctctaaggtttttcatggctatactcacgctggatttcttaaatccaagctcatttgctatatcaactgagcgtaccacaggaagcttcttgctgagaataagtatggtctctaaatagttttctgatgattcattgtttcgcatttcgaatacccccgtgagtttattttcgttcgttttaattcagttattttattataacatacattttattgtttgcaaaacttttctttttgatttgtacgtgatttgtacgtgatttataaaaatcagaaaaaatcacaaaaatccgcatttgttattgacttctaatttatgttagtgtatactaactatcgaatcagaaaacaaacgtatgcatgatatatttctaaatcttgtatgccataaatgtttaattatatcagataagaccggccgatcaccggtcttatttattttaaaaaatgtacatattcagcttaaacgagagctctttttaacctttgaagcccatccataagcactgccctagggcatgcgatattcaatctcacaaagtagcggccgttgcctccaaactcagccccctccgacagataaaggcctgtcttttcacgaatcatctgcgtaaatgccacagaatcatctgtgagcgcactgcaatcaagccacatgaggtatgtcgcatcggcatccactacatgtatctgcggcaggttttctgtcatgaagctgcagactgttttgcggttttcccatagatattttctaagctcctcaagccacggctcaccctttgtgaatgccgcaactgctgccgtgatggcaaatgcgtttggctccgccacctcgtctgtatttaatgcgcgccataccttatggcgcaaaaatttatttggcaccatcactgccgcagtctgtaagcctgccatattaaagcacttggtcggtgcaatacaggtgatgctgatatcggcgcagtcctccgatgctgccgcaaacggcacgtatgattttcccggtgctgtgatgtcgcagtgtatctcgtctgatatgaccgtcacattgtacttcctgcagagtgcacctattttcgcaagctcatcctttgtccagatgataccgcacggattgtgagggttgcaaaatatcataagcgtggtctgtggattggaaaggtcatgctccaatctgtcatagtccacgaaatatctgccgttttcgtacccaagcgggctttcctgcacatttacgccgttattaaatatggaattaaaaaatatattgtataccggtgtcatgataagcacattttcaccgggtgttgtgagctttcgaactgtagatgatatggccggtacgacccctgtgcaaaaaatcaggctgtctctttcgattttaagcccatggcgtctgtcccaccacgaaatatacgcatcattccactcatccggaatgatggaatagccaaacactccgtgagaaacacgctctgatattgcatctattatctggggagctgtcttaaaatccatatctgctacccacatcgggagctcattttctgccacatcccactttagtgagcctgtgtttcttctgtctacaacggtgtcaaaatcatacatagattattttccctcacatattatctttgtctttgatgggtcaactctgtccttttcgatagtcagtgtgccaatctcctttgcccttatcactccgcttgtcggatttaaaacactgtccaccttactgcaaatctctgcatctaccgaagaatactcaaatgccaatgtagtgtttatgagcttacagtttttcataacgaggttgtcgatgtagcaaagcccctgcaggctctcgattgtgcagtttataagtgtcagattctttgcgttccagccaaggtattctcctgtaataaatgaatcgtagactgtgacattttccgtattccagaaggcatcctttgagataagctttgaatcgtgcacctctacatttcttgagccgtcaaacgaatagttgccgaccagctggaaattcttcatgataagattatttgtattcatgccaaaataatctccctttgccgagacattctctatatcgacatgatcacagctccagagggtctcctgggcatttggaaatgtcacatttttaagctttaggttattgcagcgcctgaagttcttaggtgcctcaactattgaatctgtgacagagatattgtctgtataccagacacccgcacgcgccatgtcaaaccatgtgcagtcctttacagctatgtcactgcagtaccacagcggatatttccatctaaaaaaacagcctgtcaggctaatgccatggctctccttaagaggagactctccgtcatcaaaaattgtatcatatatatccaggtcattgcttgcaaacagggccctttcgcctgtcagaaactcctgatggatttgttttctttcgctcattatatatactcctttttgctctaagtagttctaaagttatctgtcattaactaaaagaactgccaggcacataagaatatgcagcccgacagttatcattataccccaaaccctactgaatttgtagtattttatataagtttaatattatgcgcttgatatttacagctcaagcccatcgataatgctcttaagtgcatcagcagactccttgagctttaaagcctcttcaccgtttaactcgattggaatatcactctccactccgcctgctccaacgattgcaggcattgagagaaccacaccgtcgatgccgtactgtccgtgcatcatgtgtgaaacaggaagaatagacttctcatcacgcatgattacctcgcagatacgtctgaccgacatagcgataccataatatgtcgcatgctttcggttgattatctcgtaggcactgttctttacgtttgcagcgatttcctctgtattctccttatgcttgtagtgacctctcatctcgcacatcttgtgaagctccactcctgaaacattggctgatgaccatgcaaccacctcactgtctccgtgctcacctactataaatgcatgtacgcttcggctatccaccccaaggtgttctccgagcgcatacttaagtcttgcactgtcaagcacggtacctgaaccgatgacacgctcctgaggaagtcctgaaagcttctgtgccacctgtgttaaaatatctacagggtttgcaacgataagtaagattccaccgaaatttctctttgcgatctccggaatgatgctcttgaaaattgcaacatttttatttaccagatcaagtcttgtctcgcccggcttttgacctgcacctgcagaaacaacaatgatagcagcatctgccacatcatcataaccacctgcatatatcttcatgggtctggcaaaaggaataccgtggcttatatccatcgcctctccctcagccttgtccttatcagcgtcaataagaactatctcagaaaaaagaccgctctgcataagtgcaaaaactgatgccgaaccaacgaatccacatccgatcatgacagcctttcttgggtttgtcttaacaactgcgctagttttattgctcatgtacgttcctctctttcttatactataattcaaatagttgctttttattataactattcatcacaaacacaaattctcaatatctgctttgttatcagtagttctgaataattattttatatatatattatacccgcattgtacatataatccgttgtaaaaacaacaaattacttgataaaatacaatcaatagcccattgttcccatttttatacaattttaatgcagattttcacacaaaaaatgcaatactaaaaagcaaaccggaccaatacagctaaatgaattgtcatttggcatattgatccggttatattaaaatgctgcatcagcttattttgtgcttgaatttctgtactcaagcggtgtcattccatacagcttcttgaactgtctgttaaaatgctccacgttctgatatcctgcctcgattgcgatattctcaacagttgtgatgctgtttctaagcagtgtgcgtgccttcttcatcttggcattggtgaccagctctccgaaagtcttgcctgacttctcctttatgtacttggagatatacggctctgtcaggttgaactgtgcagccatgtctgcaagcgatactgtcttgtagttggcctggatgaagttgagcatagcaatatagcgctcatccttcacgtgactgtcagccttggtggcaagataatggtttaccgcaacaacaagcgctccgattgatgccttgatgatatcctcatccacacctgtgccccagaacatactgccgtcaactgtgatacccacatatgccatagcctttgatgaagatccgtgtgaaagcgcatgctcctcgtatacagtgagctcaaagctgatgtcaaaatactgcttaattatattgctgactgcatcgagacgaccgtttccattggcatctacctttctggtgctgtcattgtgtaaaataactgcctctgcaaaaatgccgtttacctgcttaaagtggcactccggtatagtgaaatatggatgaaaatccacataattgtctgtaaagatactgtgtacccactcaggtgaaagctccttgtgctcctcgtccgatacctgcttgaccatgtatccgacctgctctctcatctgctgtggcacattgataccgaagctctgcttaaggatatatgccactccgccctttcctgactggctgttgatacggataacatcagcctcgtatgtcctgccgacatcctttggatctataggcagatatggaaccgtccacttatctaacttcttttcctctctccatgccatgccctttgagatagcatcctgatgtgagcctgaaaaagcagaaaaaacaaggtctcccgcatatggctgtctctcgcctaccttcattctggtaaatgtctcatacttctccctgatctcaggcagatttgaaaaatcaagctgtggatccactccgtgtgagtaaagattcatggcaagtgtcacgatatctacatttcctgttctctcaccgtttccaaacagcgtaccctctatctcctcagctcctgcaagcacaccaagctctgatgtggcaacaccgcagcctctgtcattatgaggatgtaagcaaagcactactccgtctctgtacttgaggtgcttgttgatatactctatctgtgtggcaaaaacatgtggcatagcattctctactgtggtaggaatattgatgatagccttattatcagcctttggctgccatacatcaagcacagcgttgcacacatcaaccgcataatccacctcagtgcccgaaaagctctccggtgaatactggaaacggaaattaccgtcagtctctgctgcaaggtctctcagtaaaatagctccgtcaactgcaagctgctttatctcttcctttgacttcttaaacacctgctcacgctgtgcaacagatgtggaattgtacagatgtacaactgctctcggtgctccctcaagtgccttgaaggtcttcttgatgatatgctctctggcctgtgtcagcacatgtatagtgacatcatcaggaatcatatccctctcaataagagctctcgtgaaattgaactctgtctcagaagctgccgggaaacctacctcgatttccttaaagcctatatctacaagcatcttaaagaagtcaagcttctcctcaagactcatcggctcaattagagcctggttgccatcacgtaaatcaaccgaacaccacagtggtgctttatctatataatccttcttaacccagtcataagtacattcaggaggcagaaaataactgcgctcgtatttttcatatcctttcatcttaaaacctcttttcgtttgaactgatataattgtaacacataagcgcagttattggaatgattatatttaatcacttttattgatgtaatttaattttttataaaaatataatcaactttattgattttgattattctaatcagatatttaggctgaaatatccggctaatcctctctcttattaccccagaaaaacaatgcaactgttcctggaccggtgtggcttcctatagtcgtaccgatatcatttatctctactttacccttcatcttcgggaaggcagcctcaatcagatcagctacggctttagcatcctcatagcatgcagaattcgatatatagaccttatccgaataatcggcaccgtccttgcagagtgcctgcatcttcacaagcatctcctttattgccttctttttagtgcggattttctcacgcacaataagctttccctcattgctcacattcatgaaaggacagatattaagcacatttcccacgaatcccgcggtctttgagatacggccgcccctgataaaaaatgtaaggtctgatgagaagaaccagtgattcacctcaagtctgtgctccatggtccaatcagcaagtgtatcaatatccatgccgctatccctaaggtcagcgagcttatccatcaaaagaccaaagcctgacgatgctgccagcgaatcaatcacatatatctttctgtcagggtattcctcctcgagagcctcctttgcaagccttgccgagttgactgtacctgatataccggagcttagtgtacagtgaagcacatcatatccctcatccagaaactgcctgaagtactccatgtactcctcctgattgatctgcgaggtctttgtcatggcacctgcctccattgccttgtagaaatccggcagtggcatggactgtcctaaatcatccatatactctttaccgtcaagctcatagtgaaagcatgcgtacttaatatttctctcgagcatatgctccctggtaagatctgctgttgaacagcagctaatcacataatttgacatattattttcctttaccttttgaccttttatcattatatgtagtcagatacatatggtatctcatgatataaaatatcgtcaagctttgcaacagcatcatacgtagtctgtattttgcccatctgcaaaagcttctcagcactcttgtagcctaaaagcagtgtggtaaacgtgccaatagacatgcttaggtgatactgtggatttttgtcggtgagagcacagtgccctttctcaaaatcaatgacaaatgtgccattgttccacggaagaagttcatctgctatctcaaagctaaaacagccgcccgggccatccgggtcacagttatactgtgatataaactgcgccacgtcgatgattctgcccatggcatatggtcttattgtctcctttatatcactgtcatcgagctcaaaagcgatgggctcgctgtaatagttgttgcctctgacctcatcaatcatggaatcgtgcgcatgaatatactcccacagaccaagctgcgcctcacggtttaagtagatgagctccttgatgtgcatgacatcggagctgataagatacaccatatagccacacggttcgtcatcctcgttatagtagatggcgaccatcgtatcgtcctcatcccagcggaagtactcctcccaagccagattgtttctgtacagacagccgtgagtcttcgcggcaaagtgagtatgaagcttcttaaactgctcgtcatcccactgcacacggcgcacatagcccggctccttaagctttgtaggaatctgtctgtcctttatcacatatgtcatcttgtttgagataatctcccagccaagccctctgtaaagaggtatggagtatggatacaaaagggcaaacgacttgttgctatcgcgcatcctcgtaagactctttctcataagcttcttcatgagaccatgacctgtgtactcaggatacgtgcacacacttgtgacaaagcccacctcgtagcgctcaccatatatattcatatcgagcggatataccgcaaactgagccacaagctcctcttttttgtctatgatattgaagcagccaagcacatcagctctctcaagcaccggaaacttcgactgcttgatttcatcatccttccaaccggtctcggcaagatctgcctctgttacctgaaaagcataacgaagcagtgcattgtattcctccgcatcatcctttgtcagtactcttatcttaaattcatctgatttaaaagaatgcatagtgtcctttctcgcctgtctttactgtatacatcagatcatccgccttcttaatgagctcagtaatctggctctcactggtgacatttctctcatatgaaataccaatagaacaggtgatattcttctcctctttaaactctacgtcatgattcaggtatttctttatctggcagctgaagccatcggcctctgcaatcctcgcatagatgtccttcgcaatattctcaagctcgtatctggagcatgactcaatgactatgatgaactcatcaccgccatatctgctcacaaagcctctgtcctttgccacttccctgaatataaaggccatctccttaagtatcagatcacctatatcatgaccatacgtatcattataatgcttgaagttgtccagatcaataaacataagtcccacatccataccacctgatgtcacgcttatgcgcttttcaagcttttcaatctcctgatacatacctgctctgttgtatatgcctgtcagcatgtcggtaactgcggcctgtttcagtctcctgttcatctcattagccttctcgttggcctcaatacgggcaatggaatactcaagttctctgaataacagcttgaaaatactcaaatcatcctcgttgagcatgtatcgctctatggagccatgccaattctccttcatgcgcacatatgctataagcacacttgaaagcgcatcattcttgataaaaggcaccgcagcaaatgaacatacatcatccacgccaaagtacgagatgatattttcatgctcgtagaagtcctctccaagctttgatgtggcaaacccctccggatagtctatcatgatatcacatataccctttataacctcatctgtcatatcacattctgtatcattataaagcacctgcggctccttcgcgtgcagatctataatcagcgcacagtccagactgaaatgattgataaaattgctcatggcattttcaatcatagtctccttcttctggtcatttacatctacaatagtctgccatatggaaataaactcaatctggcgctttgagctctgatagtccttagcaagtccctgctgctttacaagcagatcaatctgtctttcattgataaagccttcactcagtgactctaagttgatattttttaacatttcaagcggagctgcttctgctatttcatgcattcttttattgtgtgcatctaaaagtattctctcatgctctataagctcatttttgccgagctgttcaaacagcttaatcctgcttttcctgtatatcgaatatgcaaaaaactcattgccctccgcattaacgaggtatctctctgcatcctcaaactgtaaaaaggcttcttcctttttatcatcgtgccacaagagcatagccgatgcaaatgagtacagaaacatctcatcatcgcatctggaatagtcatgaacagcctctgttcttgtactgtcaattaccctgtatatgacgtaattgagaaactgcttgcagctgagcagatagcgctcacagctgaatctgtcacctgaaaatatagatgcaagtgcaagaagcgcatataccttactcgtgttgcacactcttaagctgtttagatgaagctttataatagtcttcatggcaattaaaagtgcctggacagcctccttataattaccctgcatgatatagttaagagacttgttataatacacctcagctatatcctccggcatcttcagataatataacatatttattgcagtattataataatcgtcaacaagctcatttttacccatggcactcagattgtagcctatagccgtaagtactctcgcaacatatatattgccgtgttccttcatgaactcgtatgtacggataacatataaaaatgctatctcattgagaccgtttgtgctggcaagcatgatagtcttctgatatgcatcatacacaagctgctcattttctatcttctttgcaagctcaagtccctttgtaaaatgctttagcaatgattcatcataaaatgactgtttcaccacatcccggctattgtcatatgcgtaaatatatatatgcgcaagatgatttctgtatccgtgctttataatcttttctataaattcatcactgacaggtatatcctgcacacagaaaaatatattgtaccagcccgacatctttatcataacggacaaaagctcggacttgaattcgagcaattcatcatccgccaaaagtgcatagtcataggctttctttgcacagccctcagccttctcaagcttgccctgatacatatagcaggtgcccttcataaaataatatatagaaaaataatgctcactgtcactttccggtatcagcgccttgtactcattcgtaagctcaatcgctttggacatctctccaagtaaaacagatgtccttgcatagatcaaataaaaacgtctcagactcttttcatcaatccatgcatcctcaaacttaatcttgtgctctatgatacgacagcctctccttgcctgctcataatccagaaactccataatatttgatgcttcctgaatactctgctcaaagtttgtagtgatatacagctcgtcatcacttgtgtctcttatatgattcttctgttgtccggcactgcctatatagtatatggcactcctgtcctcaagagactcgactatacgatcccacacctcaacagtactgtcagtacccttgacctggacattaacacctaagacaataccgatattggtgcacggattgtcaatcagatacttgatggtctcaatagagctctttgacgccatctggaatctgtttatcacaatcatcaatggcctcacttctgaaagcctcttaagcatgtcaactatagccttagtcatgcgtctctgctcgtatgctacctcatttaacagcactgtctcctctctaaaacactcaccggtctcataatagctgtttaacacctgtctgtgcaggtagtacacaccgcactccctttggaaatcatcaaagcttccgcctataaaatgcctgtgcatattgcatatgatgtctaaaaatggctcataagctccgactaaagtgttgtaagagaactcactgtatgcaaaaaagacgttatcctcattgctttgataacgtcttataacctcaagattttcaatcgaaaaatcattgctataattcgccattacgatatttcgagtctcttttcctatgcgattgtaaatctgttcaattaccccactataatacttttctatcatctgataaccccatcacgttctaaatctaacacaggataaatctttccatgtagttaaatttccgaaataatcctaaaaatataatagcccaaaattcctaaaaagtcaatcttttgactcaataatgataaattttcctctatggatatcaatcactgcatggtcatcaattatttcattggatatgccaagcgatgtaaatctgtcaaatgaataatcagtaacaggatacttaaagcctttaagactcacctcattgtcgtctgtcactgctataagagagacaaacctgccatactgggctgatttttcaatggttacgggcttatctgccatccttatacggttgtttgtatcgataatgctgatgtcagttttactttccagtcctatacccaaaagtgaaatatttccaagcacatggtctattctgctgcctgttgcaccaagcagcactatgcttcgtgcaccctcgcttatggcaagtcttatggcatactctgtatcagtatcatcctttatgggattgagtctgtgtatctcggtctgtccctttctctcaaaaaactccaaggcctttgtcgtggctgaatcgaaatcacctacaattatatcaggcgtgacaccgttttcgtacaggaaatccattccgctgtcagccgcaattatggcatctattccgtcagtctttatctcatttaagccgaattccttatctatttttccaccacatacaatcaaatacctcattttatccaccttcttataaataacatatccacatttgctacagccccggaagcatttttgttttaacctgcatctgttacatcatgatattcagaaaaccctttacattttcttctatatctccgctaaacaccgcacttcccgcaacaatgatattggctcctgccgcaagcagtgtctccacgttctcaagattaacaccaccgtccacctcgatatcagccttatttgcggttttctcaagaagtgcctttaagtcgcgcaccttgtctacagtgtatggaataagcttttgtcctccaaagcccggatttacagtcatgataagcaccatgtccaccttgggaagcacatactctatggctgagagcggagtagccggatttaatgctacacctgccagtatgcctttttcctttattgcctcgattgtcctgtcaagatgcttacatgcctccgcatggactgtgatgatatctgctcctgctgtcgcaaaatcatctatatatctgaccggctcatctatcatcagatgcacatcaaacatacgctctgtgcactttctgattgtctttatgaccggcagtcctattgatatgcttggaacgaagctgccgtccataacatctatatgcacatactgtgctccggcctcatcaagctgcttaagctgctctccgagtattgaataatccgctgataaaattgatggtgataaacagttcatgtcttcctccgtttgattatgctttaaattaatacttttgtctgtttttaagctcctcatataaaagcttataattatcataccgcacctgcgatattttcccatctgaaagagcctccttcacgccgcagtccggctcatttatatgactgcagccctgaaacctgcaatacggctcatactctacaaactccggataacatgtccatagatcttccttttcaaagcccggcacatccatcgagctgaagccgggtgtatccatgatatacgtgccatcctttatagggataatctcagaatgtctggtcgtatgctttccgcgctctattttctcacttatatgtccagtctccatctgcacatcatcctgcagacagttaatgatagatgacttgccaactcccgagggacctgcaaccgtggttgtccttccctctaaaatgtgctttatctcatctatgccctcacctgttttcgtgctggtaaaaagcactctatagcctgccggctcgtatatgcttttaagctcctgctgctctttaggtgtgattaagtcctttttgttgaagcatatggtaaccgggacatgctggtactccatcatacacaaaaacctatcaagcaggttgaaattgggatccggctttgcggatgcaaaaataaccagggccatgtctatattggacacagccggcctgataagttcgtttttccgtggcagtatacgctcgacattgcctatgtgcttttcatcatcgaggactgctatgtcgacgatatcgcctaccagtggctttatcttttgttttctgaaggtgccttttgctttgcactcgtagagagtgccgcctgtggcagtttcttttgcttctttggtttcttctacgtagacgtagtagaagccggcaattcctttaataatttttcctgtcatggttttccttgtgtacttttgtatttgcaggagtcacgctttcggcggggtacatgccgcgctttgaggttgtgtgggtggcggtggcaggcatatattcctcttaaaaaatatgaagccagccccgggctctcctacggacaggctatggcttgctctgccctgttctttcctcggtaggtttatggcaccccggggcatttcatattttttcctcggaacacatgcctgccccgcttccttagttcctctccgcgagttcaggttttcgtccgcgggttggtgtgggaatggggtgcggattgcaccacttcgtgggtgctatccggtggcttactatgaagcgtgtattggattgctgctttgtgcgctatatgtgtatcgcgtgtatttacaaatacgatggcgatacggaaaacttgacgtagctgcgctacggctcgttttccttgtgctgggaatgctcccgctttccttgtattgccatccacgttttcatcaaattatggtacttgtacagaaatcgttttttctcccggcttttcacctgttacatttccattctcatccttgacaggctctgtatacttccatgtaaccgttactgtacctgttttacagttcattgttccacttactgtaactgaagctgatgttacatcacttccgcttgcataagtttttccgtcagaacccacaagtgaatatgaaccacctgtaatattaacttctccgatatcaagcttaactgtcttacttacgttagttgatatctcctgcttacccttactgagtgtcagtgtgattgtagtgcctgcggctacggtttcgccggatttggtctggctgattacgctgccggcgggtactgtgtcgctgtactgggagtcagcataggtgtacttgagccctgctcctgcgagggcgctttctgcatgtgactgtgaggcacctactacgtttggcacggtgattggcttctggcccggtgagagggtgactgttactgtgctgccctttgcggcctgtttctttgctgatggtgactgtgctgttactacatctgctgctacactgtcattgtaatctccatactcgaaggtgacactaaagcctgctgactcgagtgtactctttgctgagctcttggtctttccgattacacttggtatcttgaccatctctgatgtactatcaccttttcctgcgataactacattaatctgtgaaccacgctttactgtatctccggccttgacatcctgctcaaggattgtgccgtccttttgatctgactgctttgtctcaaatgcaaatactgtgaggtcaagctttaagcggtctactgccttctgagcatcctccactgacatgcctctgatgtcaatcatctggccctctgtctcagtctgtgtctctgactctgattcagactcggtctgtgtctgtgactctgtctgctgtgactctgaattctttttgccgccaaacttaaacactcctgccactgaaagtgcaagatatatgataactattacaatgattacggctgttactatacccatgattgtgattgctttatccatctttggatttaaaagcttgccgtcatcatcatcgtcatcgtcttcttcgtcatcatcgtcgtctaagagtgactcatcatattcatcatcatcttcatcgtcagcatactcatcatcattatctgcatcggtatcatcatcgtttaagtcctctgcgacacctctgccctcttttatcttgtcaagctcctccgggcttataaccttggtcttgccaccgtcaacgagtggtgctattgtgacgaaatcctcatcaggatgcgcaagagagcgccttatgtctgtgagaagctcctcaatagtctggtatctgcggtccggtgtcttttgtgtacactttaagatgattttctcaaagctgattggcagatccggtgcgtagatgcttggccttgcaatctcctcctgtaggtgctgcagtgcaactgccactgtggtatcaccgtcaaacggcacacggcctgtaaccatctcaaacattacgattcccagtgagtaaatatcacttctgccatcgacgaagccgtttcttgcctgctccggagatgcatagtgtactgagcccatcacatctgagcttattgtatttgaagatgtagcctttgcaattccaaagtctgtcacctttaccttgccatctgtagaaataatgatattctgcggcttgatatcacggtgaatgatatttttattgtgagcggcctctatgccccttgccacctggattgcaatacttgcagactccttgaatgacagctggccctttttctcgatataagtcttaagtgtgataccctcgacatactccatgacaatgtagtacagaccattctcgctgcctacatcatagatatttacgatatttggatgctcaagtcctgctgctgactgtgcctcagcacggaacttggtcacaaatgaactatcctccgaaaactcctgctttaaaacctttatagctacaaaacggctcagtatatggtcttttgccttgtatacatcagacatgccgcctgcgccaaccttgcttaggatctcatatcgatccgataaaaaacttcctatctctaacatctgttattacctcgtcttaaaatggtttaataatcattacagtgatattatcgcggccaccgtttgcattggccatggcgacaagctgtgacgctgctgtctcgatattatcattttgcctaatagtatcgcatatttctttatctctcaccatattggtaagtccgtctgtacacagaagaatcctgtcgtcctcacatagctcgacctcaaaaaaatctgcctccacatgatctgctgccccgacagctctcgtgatgatattcttgtccggatgaactctcgcctcgtcggcatttatctcacccatcctgaccatctcatcaaccagtgaatgatccctggtaatttgtctgatctgctctgtgccacctacaatataaagcctgctgtcacctatattggccacaaaaagcttgtttcctataatagttcctacgactaaggtggtacccattccacgcttagcttcatcctcacgagactcagccaccaaaagctcatttgccttgttgatagcctctttgatgatggataccggttcatccccggcatttctcgataccgatgcaaccacacgctctatagtgtatctggaagcatagtcaccggctttgtgtcctcccattccatctgctacgatgaaaagattcggaagatttcctactgcagtgtcagacgagaaataaaaatcctgattcatctcacgaatagcacctgcatccgtaatggaaaacgtcttcatctagtttattcctctctctttatctatatgcttcttgcgaagctgtccacaggcaccgtctatatctctgcccatttcccttctaatagtaacattaattccgtttttttcaagcctatttttaaaagcctctataacacccttgttggactgcacgtagtcgcgctcctttatcgggtttaccggaatcagatttatatggcagttcatgccatgcacgagtgccgaaagctctgttgcatcctcggctgtatcgttcactccgcctaccaggctatactcaaaggtgactctgcggccggtctgtgcaaaataatatttgcatgcatcgaccacatcatgtatatcatagctgtttgcaaccggcatgagagcttttctcttttcctggttggaggcatgcagtgaaagcgccagcgtgatagaaagcttttcatctgcaagctgtctcatgcgcggtacgagaccacatgtggaaactgtcagattgcgctggctgatattgataccgttttcatcagtaagaagctctataaagcgcagcagattgtcgtaattgtcaagcggctcacctgtccccatgacaactacatttgagatgcgctctcctatgtccttgcctatctgataaatctggtcaatcatctcagacggcctaagccccctaacgagaccatcaagagtagatgcacagaatctgcaccccatcctgcagccaacctgcgaagatatgcatacagagtttccatgcttgtacttcataagtacactttctatgacgttgccatcatcgagtgcaaagagatattttctcgtgccgtcgagctttgacacctgcacctcctctttttttagcgagatgagtattgcattgtcctttaatacctgtatgaacttttttgaaatattggtcatctcatcaaagctgtccacatgcttcacatgaatccactcatatatctgcttcgcacggaatttcttctctccgagcgatatgataaactctgtgagctcgtccatattcattgatttgatgtcagttagttgttcttttatctgttccatattatttttattaaatctgcatttaactattgtttttaaaccaatttatatttattaattcatgatttattttaatatcataatttactttttatgaatcttgcaataaagaatccgtcacttccatgctcaccgggcagtatctgtttcattccggtgccttcagcaaagctcttatccagctcaaactccggatgcttttcaataaaccacctcacattgtcctcattctcagcctcatctatcgtacatgtactgtacacgagcactccgtttggcttcacgtatgtatgcacggtatcaagtatctgtctttgaagagcggtaagctcatctacagactcaggcgtcatcttgtagcggatatccttctttctgccgagcactccaagccctgagcacggcagatcacaaatgagtatatctgcctttcccgccgaatcagcatcaaatactgtggcatcccacacctctgccgacatattgttaaggccatgcctttctatattttcctcaatcatatcgaccttgttatcggtcaggtcacgtgcgagcacatggccgcttccctgcaaaagctcagctatatgggtgctcttgccacccggtgctgcgcatacatctatcacatagtcgcccttctttggagcagccgtctgtgcaacaagcatggagctgatatcctgcacatagaaaagtccgtctctgaagctctgcaagccattcaaataatcaaatccagatataacaaacgcataattaagttcatcaaccgctgtgaccgtcacaccctctgcctcaagcattacacgaagctcatccggagtacacctggtcaggtttgtcctgatgcttatggtgctcttactgtgaaaggccttgaaaatctcctctgccttctcctctgtgtatgccgcaataaatctgtccactatccactgtggcatcgagtatcggatgcttaaggtatcaaactgtactgaatctatatttcttgcaatatttctgagtacaccgtttacaaagcccgaaagctgtgcaaacttatgcctctttgcaagcttcaccgcctcattgcatacagctgaatccggcaccgcgtccatgtactttatctggtagacgctcatgcgaagaaggtttctgatgaagggcttcatcttccttacctttgtctttgaaaaagagtctatgatgtagtcgagctgcagcatatactcgatagtgccgtcaacaagcctcgtcataaaggctctgtcctgctttgacagatactgatacttgtcaagcacactacgaagcacgatatgtgaaaatgatccacgctcattaatctcaataagcatctcaagggcaagctcacgcgtatctacagagtgctcattatgcgctgccacatttgattttgccggtctgcccggtatattatttttgtttatttggctatttttattattatgattatttttactatgattatttatcatgatgatgtttccgaatagttacatatacatttaattttctaactaatatatccaatttgaactgccaccctgtaaaatcacaggcaaacagaatctaaaacaatatcagtcgtcccgtctgcgtccgtttgtgataagtatgatacgaaggagctgtaaaatagcagccgccgcactggctacataggtaagtgccgctgacttgagcacccttcttgtgtacctaagctcgtcatctgcaagtatgccctgtgtacgaagcatgacaagcgcacgtcttgaagcatcaaactctaccggcaatgtcacgagctggaaaagcactgctgccgaaaacagcaatatgcctatatcaataataagccctgacgagcgtgtgttaaataataagccgataagtataaccggccatgcaagcatggagccaaaattggctataggtacgagcgcactcctgattgaaagaggtgcatagctttttgcatgctgtatagcgtgtccacactcgtgggctgctacgccaagtgctgcgaccgatgtggcattgtacacaggatcagataaattcactgttttggtgcgcggatcatagtggtccgtcagactgccggacacatgacgcacctgcacatcatatatgcctgccgcctgaagcactctctgagctacctgtgcgccattcatgcctgacatgcttcttagctgcgagtatttattaaatgtacctttaactcttgccgatgcaatcatacatatcactgcacctatcacaacgagtatatatgtcggatcccaataataatatcccatgtatcatctctccttgctgcttattataatgcgtgtagtagtttgtcaatagttacttataatgaataactataatgtgaagaacgagccctcttccacatgacagcctctcaaaaatgagcctgtatccatgcgcttcttgccctggagctgtacctctactaaagataatgctccttttcctgtctgtacatacatatcattttttccgatatgataaatacagcccggctcataatcatcgctgccgtcaatcacctttgcactccacaccttaaatgtcttaccattcaggtgggtgtatgcgctcggccatggattaagcccccttataagcctctcaatctcaacagccggctttgtccagtcgataaagccaagctccttactgatcattgatgtatgtgtggcctcctcgctgttttgaggagtatactctgcagtgccatcctctatcatcttcatggtctccacacacagctttgctccctctgctgagagcttatcaaacaggctgccgccggtctcatcaggtgcgagtctgactgtactctttgcaatcatatcgccggtatcgacgccctcatccatcctcatggtagtgacacctgtaaactcgtcaccgttaatcacagcccactggataggagccgcacctctgtactttggcaaaagtgaagcatgcacattgatacagccgtatcgaggcatatcaagaatactctttgacagaatctgtccaaaagcaaccacgattattatatctgcattaaactttctgagatactctatattagcagtctctcttattttaaccggctggaatacctcaataccgtgcgaaagcgcacactccttgaccggtgtatactgcattgtcttgccgcggccctttggcttgtcgggctgtgtgacaaccagtgccacctcgtgccctgcctctataattgcctcaagtgttcccaccgaaaagtccggtgttcccatgaaaattactctcatcttactgcctcccagatattttccaagctcagataacaaatgtcatcctaatgattactcctgtgtatcctcatatgtcacatcgtgaagtgcgccctcaaccttctccacatagagatgtccgtcgagatggtcaagctcgtggcagatacatctggccaaaagctcttctccctctatctcatactcattcatatcctcgcccatgaagcgagcctttacataattcgggcgggtcacctgtccggcttttcccggtactgaaagacagccctcatcgccggtctgctctccgtcagactcgataatttcaggattaatcatcacgattggaccctcgcccacatcgataacaacgatcctctttaatatgccaacctgtggtgcggcaagtcctacaccattagcctcatacatagtctcaagcatatcatcaataagtgttactatctttggagtcacctccgtaacctctctgcagaccttgccaagtacagggtctccctccactctaatagttctaagtgccataattgcctccttctatatctatcaaaatccactcatcggattgaaatcaaatgagatattagcatgtttcattgccgtatcagctttcacagcctgctctatgacatcctttatggaaatgagcgccgcatagtcagatgtcttcatgtaaatcaccttgcggtatatgtcatttaccttggcgatggtcgcatccgcaggaccgatgagctgaatccgatgcctatcatccgggctgtgattttcatctgcatgcgatatcatctgcgacgctatatcgtacacttgctgtgacatgctgccgcactcactctcatcaggtgatgtgacatggactaaaagcatattccatacaggcggatagttcataagcctcctgtactctatctccttatcataaaaagcctcataatcctgctctttggccgtctggatggcatagtggtcagggtcgtaggtctggataaccacattgccaggaagctttcctctgccggcgcgccctgccgcctgggtcagcagcgcaaatgtgcgctccgccgcatgaaaatcattcacatgcagtgacatatccgccgccagcacaccaaccagcgtgacatttgaaaaatcatgcccctttacaatcatctgcgtaccgataagtatatcggcctcatgattggaaaatgcctgcagaatcttctcatacgcatccttcgccctcgtggtgtcataatccatgcgcagtatacgcgcctgtggaaaacgctttgccaccatcgcttctatcttctgtgtgccggccttaaagccgctaatgtacttcgagccacagctcggacacaccttaggcaccggctgtctgtagccgcagtagtgacaaaccatcactccgccgctatgctcactgagtgatacatcgcaatgaggacattttaccacaaaaccgcacgctctgcacgacataaatgccgatttgccccttctatttaaaaaaagcatggtctgctggccatttagaagcctctcctccataagctcctgaagcctggtggaaagaatcgagcggtttccctcacgaagctcctgcctcaaatcgacaacctcacactttggaagaggtctgtcgtccacacgcttatccagctccaaaagcctgtaaacgcctgtctttgccttgtaatagctatccaccgacggtgttgcagaaccaagtaccacaatagcatcggacatgcgcgcgtactctatcgccacctccctggcatgatagcgtggcaccgactcgctcttgtatgaattctcgtgctcttcatctattatgataagtcctaaatttgaaaaaggtgtgaacagcgccgaccgcgggccaatcatgatgtcaatatcaccattcttagctctctcaaactggtcataacgctcaccatttgaaagtcttgaattgattatcgaaaccctgttcccaaatctggcaaaaaaacgcatcacggtctggtaagtgagggcaatctcaggaatcagcacaatcgcctgacgagcggactgtatacagtgtgcgataagctccatgtacacctctgtcttgccgcttccggtgacacccttaatcagataagtatttctaaggccagcggcaatgtcaccttctatcgcatcaaccacactctgctgcgcggcattcagtaccttatcataggtgtccacactcatatgctccacaggatttctgtagccggtctgtgtgatgacctcgataaagccgctctgctcaagcgctcttatagtggcagccgacaccgacagcttgcctgtcacaaaggaatactcaaggctcgccccatcatcagcatcaatcagcgcacgaaaaagcctggcctttgccttttgtttttttgcctcgcaaagcgcaagctgcgcccttgcctttaccttgtctattttcagtgcaatactgcggctcacctgctccttagcctgcttctttacaggtataacagtcttaagcgcctgattcatggtagagccgtaattgcgccgtatccatgccgcaagtgcgatgagctttgcctccacagccacagagtctgcctttatcccgataagaggctttgtccttgccgggtcgtactcaggcttatccgtgacctcaatcacatagcctgtgatagtgcggctgccaaatggaatatccacgcacacacccggacggatgtcgcataaaagctcatccgggatgctgtactgaaatgtcttatccagtttttcgtgggatatatccacaatcacgttggcatacataactgatactatttaactccttcgtatttctcctcgcagtacttgcagcggtagatttcgtttttctcatcggaaagcacgaaaatctggtcaagctcctgctcaattgaagtgatgcatcttgggtttttgcacttgatgacatttttcacctgatgaggcagcttaagctccatcttgtccacaatcttgtcaccctttatcacatttacagtgatattgtggtcgataaatccaaggatatcgaggtctaatgactctatcggacactctaccttgatgatatccttcttgcccatcttgctgctctttgcattctttatgattgcaactgtgcagtcgagcttatcaagctttaaatccctgtaaatctgaagactcatacctgccttgatatgatcgagcacaaagccctcatgtattccactaatattcagcatattatcctcctttagtcctcagccagtccaagcagtgtcagaatcagcgccatacgcacgtaaaccgcatactgtgcctgcctgaaatagcatgctctcgggtcatcatccacatcaacagaaatctcattcacacgtgggagcggatgaagtacaatcatatcatcctttgcaagctccatcttctcctttgtcagaatgtagaaatccttcagacgcacatagtcctcctcattgaagaaacgctccttctggacacgtgtcatgtagagcacatcaagctctcccatggcatcctcgagcttttctacctccttgaactcgatattgttggcacgaagcacatcatcgcgcacatagtcaggcaccttaagctcctcaggagagataagcacaatcctcacattgtcatatctgataagtgcattgatcagtgaatgcactgtacgtccaaactttaaatctccgcaaaagccaattgtgatattattcaatctgcccttgatggaacggattgtaaggagatcagcaagtgtctgggtaggatgctgatgacctccatcgcctgcattgattacaggaatacgcgatttctctgaagccacaagaggtgcaccctccttaggatgacgcatggcacagatatccgcatagcaggaaataaccctgatagtatccgaaacgctctcgccctttgacgcagatgacgaatcagcactgtggaaacctaacaccgagcctcccaaattaagcatggcagcctcaaagctaagcctggttctcgtgcttggctcgtaaaaacaggttgcaagcttctttccatcgcacttgtgtgcatatttctcaggatgagcctctatatcatttgcaagatccagaagcttgtccaactcttctacagaaaaatccaacggactcattaagtgacgcataatttgcctccattctttttcgcgtaacaatttttattacattttttctatcatataataacttagcgcaatattcaagttggcttttacacttttttgttgtaaaatatatgacagaatataactgttctgaacgcttagcaattgtatcgaagttttcatacaattacgacaatttcaatatcaaaaaggagaataatatgtctgtaaatgaatcacaaatcaaaaacaccacagccggcgcaatcgatgatgacgatgctgtaatctttaaggagagaaagagactgctgtttctcggtctgccatggaccttcacaaagtacaccatcacaccatcctttatcactgtagagtccggactcttgagcaccacagaggatgactgctacatgtataaggtagctgatgtaaagctcaccacatcactgatggagcgcatttttaagctcggcaccatagtctgctacacaggcgatgtcacaaaccctgagcttaagcttgttcacgtaaagcattcacgcgagataaagagctatctgctcaagcagtctgaggccgcaagactaaaaagacgcaccttaaacactgtggatatcggtgcgcacggagcagacatggcagatttggatcatgatggtattccggattcgctggaatagactttgctcgtatcatacatcagatattgtgtactatttaaagaaagcagcttccggttcgtccggaagctgcttctatttttcatttcatgctatctcatttagacaaataccctctgaccacagcctttcgcgccacaagcttcttaagcctcttatacatcacgactgcaagctcacaatccccggcttcaagcttatcaggtccataattggccataagcacaagctccataaacctctcaaaatcactccttacaagctcaggataaacagccagcaccgcatcaacaaactcaggccttgtggtatccaaaccagcggcatccacacaatcgccagccttagcagatatcctgccatccctctcaagcagctcataaaagctcctaaatatgattctgactctatctcccggtgaaagcctcttatcgagcgcaagcgtgcgtctcttcacataccatacgcgcagtatgaccgcaattatcacaagtaatatgccacacatcgtaccaagcaaaagcttaagctgcctgatgcgcttcatatcggccccggtacccgctgtatcctctccgtcacggtcagcatccttgtcctttttgtccgcaatactctccgtatcctctgtgtcagcctccggcatatcgagattggcaatcgtaccggcaaagcccggtgtcgtctccacaggaatccagccgcagtcaggcatgtagatttccacccacgcgtgcgcattgtcatcctgaagcacagccatatacgagccgtcagcctgacccgaaaacagattggcaggagccgcatagcccaccacgtagcgcgccgggatgcctaaggagcggaacatcacaacagccgccgaagcaaaggcagttgaatcacccttctttttttcaaacataaagcgctctatgtagtcctcatcattagaaatcttagaagcggatttggagaactcacacctctcccacagagtcctcacaacaaaattcttcacatcatcaatcttttcatatgaaagatcctgcttctgcgtatcactcagatttccctcaagcttcttgtcccactcctttttcttctttttgcaaagcttttcgatgcgcttttggctctcaggcacatcagtatagtgggtattcacatacgactcgtatgaagcctccagctcatcaagcatattccggtgattgtacgagccaagcgcacctgctgtgtcaccgtcatcggaagcagaagcatccacatccatccacttcttcatcgtatccatgtatgcgctgctctcaaagtactcataccggtcatcctgtgcagtctgcccctgcaccgagcaatcaccgcccaaaatattatagtaatcattcaggtaagcctgataaggcacataggtgtatgcagtattcgcattgagcctctcgactgagattgtgcgtgaagacacagcttcctcaccttcctcggcatcagagccatccccatcgcctgcaccatctaaagctgcaccgtccatacggctcttcacatacatcatccgaagaaatggcatattctggatataaaggagcgaatcaccatccgtcttccagtttagagccgcatctgtcaggctgtctgcatcgcccatgctccacctgtttggcgtatagtccgcacccacatagccctttaaataaagaatctccgtaggcttctcactgacagtcaccttaagcgactccacctcatcataggcagtaccgtccacatcgccaagcacaccgtcagacacgcctcctcccacgccctcgagtgagagattgagcctgccgcctgacacctgcggcaaaaacctgtacagaaactgaaggccgctgctcttcacaggagctgtcacatccgacaccacggaaagcggagcatttacagccggccgtaccacaaaaaaagctaaaagcaccacaacagcaccaaagcctgcacaaaaagccgcaagcatattggcagcacgtctggcttccttcacattcgaatcaaacacagcctcatcgcctttgccccagagctttcttctcacgcgcacagccgagcctgcatatgtacataaaaaacaaaggagcatcacaaaataagctccctttgaaatccttccaccactaagcagtgagcatatcaccacaggaaaagccacaaacaaaaacatggctccatcctgcctcttaatcacagcctcagccatcaaccaggcaaccacaaaaaacataaaacaaaaaaaaatggttgccccggttccggcatctgaaatgagaattatgccactttgataagtcctgttcatctgaccggcaatacaattaaaggtatatagcaagcccttcttaaaagcctcctgcgcaagcaaaatgccaaagcaccacagcatgatgctaaaaagaaggacgaaaaagcgatatctggccaaagccctgtattcaaatataaatgtaaaccacacacaaatggctgcccctacagccgcaagcaccgggtaatttacagacactgaaaacgcatacagaaaaatcctaaaaagcgccatcaccgaaaaaaagcacatgaccatcataggccatatagcatgcgttcccttattcccgggcttcgtgagcagcgtggctcctacaagctctaaatctcccatactgtaagctcctcatccaccttgtcataatcaatatgcttcacgcgcacaccgttgtgataaaagctgccatccatgccaagccgcatcgtattgctgtcagccgcaatctccctgttctcatagagtgcctccacatccactggttcctcatatatgcccgactcacaaagctgctcgagcatggagtatgtatcagactcactcgccacaaaccggctcatgatgcgcttctccttatcatcccaccagatgacattatgcttcatagaagctgctgccatagaccacgacacagagccaagtatctcaagaaaagcatccatcacactgacacgttcatcgccggtgcctttatatgacatatcggcaaagataaatgctgtctcattcatcggcaggctgtactccttcaccatgaaatcattagtctttgcggaaagcttccagtgaaagctgtggagcgaatcgcctctcctgtactgtctgatatcaaacacctcagacgaatcctcaccatggcgcagctttgaaaaaagctcaccgtccaccgactccgaaagcccaagcacacgtgccatgtcaagcatatgaatccttggcagcacaaacactgacgagctatgctccgaaacgctgcactcgcgcgtaaagaggctcaggtaatccttcactgcgacctttcctatattgaaatacagcttgccgcagtagccggtacgcaggtaaaagcaaagcgaagagcctgagcccggcgtaacaaaggcatcgcgcgtataagcactctccctgcttgaaagcctgctgtgacacaaaagcgtgacaggtacggtgctcatcggaagcacagaagcatttgagacatgcacatccacctcaaacttctctccctttggcacatatctgtccggcaccactaaagacgcactcagattgcgctccagataaacggaaagcataaacagacacggcacaagcaaaagctcaaacgaaagcagtgtgcgcgctatatcattgtcccagaacagtgcaactgcgagtgtacatataattaaagctatgtaagaaacctttttcttcatcaatacctccgaaaatcagacaggctatctgccttctgtctgcggtgtaggctgcttcaccgacgctaaaatctcagcaagaatatcctgcgcagactcattgtacatcctgccctgcgcactcagcacaatcctgtgacgcgccacattgataaacacagaagccacatcacgcggcagcacatactcacgcccctcaacataagcagccgccttgctcatcctggcaagtgcaagcgcaccacgcggactgactccaagctctatcctgtcattgtttctcgtggcctccaccaggctcacaatatactcataaactgtcctgtggacaaatacaccctccacttccttttgtatcgaaatgagctcatcggtgagaatggacggcatgatatgctccataggattgccatggtcacgactcatcagaatatcaagctcatctgccctgttggggtatcccatgctgatgcttatcataaaacggtcaagctgtgactccggcagcatctgtgtacctgcagagccaatagggttctccgtagcgataacgtgaaacggtcttggcaccggatgagtcacaccatccaccgtcaccgtacgctcctccatcacctcaagaagcgcggactgtgtctttggcgatgtacggtttatctcatcggccagaaacagattgcacatgacagcgccctcctcatagtcaaacctgccaagctccttcctgtatactgaaaagcctgtgatatctgtaggcagtacatcaggtgtaaactgcacacggctctgcttcatatccaaaaccctcgcaaacgcaagcgccatgctcgtcttgcccacgcccggaatatcctcaatcagtatatgcccgtttgcaagaatagcctccatgatggcaagcacacagtcatcttttccaataatcacctgtttcacagattgtatagcctgagcggccttctcataacccttcatatattactcgttcctctctcttcttctgcgccttacaattataataaaaatcacagtctccagtgtccctgccacagcaagcgccacaagcatccacggccacacatccactattcgcttcgtgagtgcgcccgactgcatctgattctttgtctcactcttcttctcgcctgtgtactcagtacgctcaccgcgcaccagaagacggtgcgaattaatcgcatacggtgtacaggtgacaagtgtacagtaatccttcccctccactatatcaaggtctcccgactcgttaggctcgactaccttaatctgatccaccttgtacgcaagaatctcatcgagcacatgcaggtaaaattcatcgcccatctcaagcttatcaagattcgtaaaaagcaccgcactcggaagacctctgtggcctgtcagcacgcagtgagtactctcgccgccgagcggatagctggactgctccatatgaccaacaccctttgcgagcacatcatcacttgtgccgctatatataggcagattcacatcaatctttggaatagtgatatatccaagtgactctccgacatccacaaggtctgcatagcttaccgcactgctctcactctctgtgctctcagccgacaccacagtactcagctggtcattgtacttggtcgcagcctcctttaaggcatccaccttttcctcgtccagctgcttcacctcactgtcgtagctcgtgatcgcagagctagcatgcttttcatttatacggttgctgatatatggatagagcgcaatcgacattccggtgagaaagaggatggcgcaaaagattattcgcagtttcttcatagcttgtattcctatagctttgtttcctatacctaaggcttctgatagcacttattcaaatccacaactgcataagctgcatggttgtctgattgtagagttgaataaatgttagcatatcgtttcaaaaatgtaaaatgaaatggtaacctccgcacacgcagacaggtaagtctgtatgtacgaaggttagtcatccctttgctcttgtaagagcactttattcggttaaatcttatctaaactctctatggctattgccaatggttaggctctctttcttcctctgagcatgatgtatactgcagcgagcattccaccgataccaatgattaagaacattgcggttccgatgtcaccggtttttgggagggtgaagcctttgcggttgatgatagtttcggtcattgtagcttctgta

SEQ ID NO: 1648 - DNA, 228 bp, Unknown
  gut microbiota DNA sequence
tgaagaacagacatctttcaaaagctgttgcgtcacagaagttctatgaatttagaaccaagcttaaagcaaaatgtgatgaaaatggtattgaattaagagtcgtagacagatggtatccatcatccaaaatatgtcattgctgtggtgctatcaagaaagatttgaagctttcagatagaatatatcgttgtgattgtggttatgttgaggatagggatttcaatg

SEQ ID NO: 1649 - DNA, 717 bp, Unknown
  gut microbiota DNA sequence
cagtaggaagcggaacagcagtattcggagctgcagatgccatagagggcactcaggatatttattatggaagcacaggtgacattgatagcacggcagtaaacggcataaaggatggcctgtttcagggaaacgaggacgcatattatctgacagaaaatgcctttgcatttgcggcatccgcgatgattccaatcggtcaggcatctacagcgggaaatctgacattcaaaagcacagcaacaatagtcgccaaagaaggcatctcaatgggagccggagccggtgcgcagaagataaccacagatgtgacaggaaatgatacagcaggaatggttgccggtatggttgcaagtagagtaactgcaaaggggctgaatggaattgaagcagaggcgaacaagctggcgaaagccccaaaagggattgatggagtaaccgaggaagctggaaaagggctcgagggagcagccaagggagccgagagtgcagcggaagatgttgggaaggttgttgagagtggtagttcatcaggtaaagtatgggattattctaaacaatttgatggtgaattagctaactttaatgctggatatgagataaaaaacgttattaaagaagatttgtatttagttcaatttcattctaatgctgaagttggtagtggaagaagtttgaaatactggactacttttgatgcagcaaatagaattagta

SEQ ID NO: 1650 - DNA, 406 bp, Unknown
  gut microbiota DNA sequence
ctaaccttgataggtgcatacttttcattgagtgagataaggaaaattccttctttatcgttttgtaatttcttaatataggcttctccgtttagagcgaagatgccgatttctccattagcaacagattcctgctgtaatatccatgcaatctgaccatcgtggaattctggttccatactgtcaccactaatacggacaccgaaagtagtatcttctggcaggatagattcatctatgcgtacagtctctttcggtccatctacaaggaagttaccggttccggctgatacagcattttcaaaaatatcaatgctacggaatggaattatcttagcagtctgcttttcatatattccggatgcgtgaagcagattaatataatccatagctttttctatgcctt

SEQ ID NO: 1651 - DNA, 280 bp, Unknown
  gut microbiota DNA sequence
ctcggatgtcttgattgttagatattcttaagaatagaatatttattcatcaaatcatttgtatgaagttttcaaggtacaatgtcgattgtaactgttttatcacatcgacgatggagacggagagattcgaactcttgaccccctgcttgcaaggcaggtgctctcccaactgagctacgcccccgttgtaatttggcagccacctactttcccataccgttaccagtatagtatcatcggccgtttaagtcttaaccatcgtgttcgggatgagaac

SEQ ID NO: 1652 - DNA, 409 bp, Unknown
  gut microbiota DNA sequence
atatgtgaacaaacgtataaaagtaagggtgtaaaatcagcccccgcccataaagcttaaaatctctaccacatcgccgtcggcgatagcagtgctgtcatactcagtctttggaagaatctcttcattcagctctacaacgatgtgcttagggttgtaattgttagctgaaagatactgcgaaacagtcatgccgcatacatctgcagcttctttaccgttgatttttaccattgtgcgtctcctttccggattgagatgtggaaaaagcggggattatcccgaagcaatacattaaaaaagagttcacaaagcaatacccccgcggtggtgtaccccttcatgaactctgttcactctcaaaaatccgttattaaactatgtaaatatgtaaaattaaaagggagat

SEQ ID NO: 1653 - DNA, 722 bp, Unknown
  gut microbiota DNA sequence
gcggggatgacgtcaaatcatcatgccccttatgacttgggctacacacgtgctacaatggcgtaaacaaagggaagcaaagctgtgaagccgagcaaatctcaaaaataacgtctcagttcggactgtagtctgcaacccgactacacgaagctggaatcgctagtaatcgcagatcagaatgctgcggtgaatacgttcccgggtcttgtacacaccgcccgtcacaccatgggagttgggaatgcccgaagccagtgacctaaccgaaaggaaggagctgtcgaaggcaggctcgataactggggtgaagtcgtaacaaggtagccgtatcggaaggtgcggctggatcacctcctttctaaggaaatcgagtaaagagtttttcactgttgagttatcaagctcaatctttccggtggcgatgcgcttttgggaaacacccgtccacatcccgaacacgatggttaagactgaagcggccgataatactatactggtaacggtatgggaaggtaggtggctgccggatttataaaaaaactggttttaccagtgattagagattttaagagattaagatttctaatgactgataaaacagtcagaaagtctgtgagaactaaaactggtgatcacagcattgtaccttgaaaacttcatacaaatgatttgatgaataaatattctattcttaagaatatctaacaatcaagacatcc

SEQ ID NO: 1654 - DNA, 2266 bp, Unknown
  gut microbiota DNA sequence
ttgatacctgctgctcattcattgtatatggtataacaaaggacgcttcctcaccggcattaagctttatctccaaagcttccaaagtaggatttaatttaaaaaacagctccatgtcatactgatcaccattggttcccatttcaaatgcaaggcttgtaagatcaagtgatgttgtatcgtcctttactttggtaactgacaaggttataaaacccacacgcacactgtcgaaaggatattctgaaccatcatccgtctgatcatatgcataatcaggacatttttcttttaggagactgccatcgccccactcccatccggtctgctttatctcataatttccaagcttaatagtgtcattttctgtatatgtgatgacctttggggatggatagcaatgattcagataaacaatccttgccaaaacggcaatcatcacaattcctatgagtattcccgataaaagtcttacttgttttgatttcctttgcttcataataaattctcctcgttacttcaatttaaaccttccgctgtccaccagatagattacatctgatagattttcaagctcatccttatcgtgagagctaagcagtataagacttcctttatcacgcatatcccttatgatttctgacagtttttcctgtccctccttgtccagggcgttaaaaggttcatccagcaaaagaagctttggttcctccataatggcacatgcaattcccagcctctgcttcattccaagagaatattttctatactttctcttatcctgcgggttcagtccaaccgtttcaagtgccccacttatatcaacttcacctttatttattgatgcaagcatttttagattgtcatagcctgtataactatctataaatgcaggattctcaataagcatacctatcttttccggaaaagccatattttttccaagtaccttgccatcaatactgatggtaccgcttgtaggatacataagtccgcttaccgctctcatcagcattgtcttgccggagccgtttacgccctgaaatccatatatattaccactttccagtgtcatgcatacatcatcgagtaccagagcatcctttatctttttagaaacatgttctatctctatcttcataaaatacctcacaaaatattctttctgttaaaatacacacttccgagcacaacagaaaccaccatcacaataatgcagcttattattccggcagccgcatccattccgagcgcacagattctgttgtttctgatgatcataagataattgcccataagaaacggactcacccagtaaacagataccacaagataaactatggaaacaatatatccagcgatcgcaccggcataaacactgatagtaagctgcaccaccgcaattgtacaggcgcataacattggcagtatcagccatacaagcacttcatttccggtcgaaaactgctgcatatctattcccatttccataagcatatcatcaggctttgtgctccacttcccgattgcacatgtcacagccgcaagaaccagtatcattgcagcataatacataatcacatttatgaccgtccatatgtacttactccataaccacttaaacctgctgcctgacaatatcagtgtctttttgcctgcaccatacagatctgacgatggataaaatcctaccacaaaaaataaaaatgcataaaacaaaaaccacgacaccggaatggtaaatacgctgtcatctgtctttatgtatggcggcataccctgaagtatatttgtaaagtatgccaaaaatccaagctccggtgaattcacctcaaagttactcactgtgataaatgaaaaaaatacaaatatgaatactccgactatccattttatcttgttttccctaaatccttttctgatatcatataagatcagatttgcaaaaattctcctattcataagcaacaagctctttctttaccgcatgtatgtaaaatataatatttaccactataaggataataaacgcacagatcacaacccggatatcatttctaaacggtgcacttggcctaagaaacattaccggtgataaactcaccctgtttacaaaatgaaccatgcagaacacaaatatgtatatgataaacggtgtcagcaatatccagaaccggcttcttacaaaattaaccgcccacaacaccgcacagtttaaaagtccccagaagcagccatcaatcagcacaaaaatcagattgtatac

SEQ ID NO: 1655 - DNA, 177803 bp, Unknown
  gut microbiota DNA sequence
gagctgactgttactaataggtcgagggcttaatctggttaataacggagaaaaacaaatcggatttgtatgaagttttgaaggtacagaccttaataatcctcgatagctcaatggtagagcactcggctgttaaccgagttgttgtaggttcgagccctactcggggagttttctttttcttaggctccatggtcaagcggttaagacatcgccctttcacggcggtaacacgggttcaaatcccgttggagtcatttttagcacagcaatgcgctgagttaaaagtcataagtcgtatgccgatgtggctcaattggcagagcagctgatttgtaatcagcaggttatcggttcgagtccgatcatcggcttatatatttggaccattagctcagttggttagagcaaccggctcataaccggtcggtcctgggttcgagtccccgatggtccattaaattttttcttgcatttttgtgcaaactgtgatattatatatcacgcattaagcatttggcctagtggctcagttggttagagcgccgccctgtcacggcggaggtcacgggttcgagtcccgtctgggtcgtttgtagtgagtatctactacaattttatatgggatcttagctcagctgggagagcatctgccttacaagcagagggtcacaggttcgagccctgtaggtcccattcatgccgcagtggcggaactggcagacgcgcaggacttaaaatcctgttgtagtgatacagtaccggttcgattccggtctgcggcattcattcaaaacacttgacaagagtgttataatgaatgagtaaataaaatatgtgtgtgtagctcagctggatagagcacttggctacggaccaaggtgtcgggggttcgaatcctctcacgcacgttatatagtatagaaagagcaggttgtaatacctgctctttctatattacaaatcgtccgcggacgatttgaaccccagggttcgctctacactccgttgcggtcggcgctaagcggaagtccaccggacttccagcgccctctcacgcacgttatataatatagaaatacttggtgattctcagccattaaaaatgagagacaataaagtttggtaactactaacccaaaatagctgatgataaggaggtctaaaaggcttccttattttttacaaaggagataatgtggaatttgtgttatttaaggagaaaagggtatagaattgaaaatttaatataaattaggaggagtaaggattaatgaactattacataagtgacctgcatctgttccatgaagcatcaatccgctttgataacagaccatttggctctttggaagagatgcatgaggcagttgttagccgatggaacaataaagtaaacaatggagatacagtatacatccttggtgatatgagtatgcgtggcaaaaaagaagacctcatatcgcttgttgctacattaaagggtaaaaagattcttgttaaaggcaaccatgatgatgtatcagattacagatataagcagctattttatgatatatgcggttacagagagatacacgactcatacggcgggaagaactacgaccttgtgctatgtcattatcctatattcagttggaaaggcatgaacagaggcacgatcctgttatacggtcatacacacaatagtgcagaggacgtatattttcagaaatgccttgcaggaatggaagaaaatgactgccgccatgtaggtgataagccgatacaggcatacaatgtgggctgtatgaagccatggattgattatgagccaaggagtctgaaagaaattattgaaaactatcaaaatataaaatgatagatgaattaaggcaatgatttcaatttaaaatggagataatgtgatgaatgaacaatggtttttattgggtgatatacatggcagcgcacagccggttcactatttttatcaagaaaacaaagagagattgagtttggattcatcagcaaactatatgattctacttggtgatgttggtgcaaattttgctctcactggtcagagagatcataaattcaaatcagagctttcaaaattgccatttacttttatatgtctaagaggaaatcatgaagccagagtaaaaacggttatggacaaaaatcctgatggatgggaaacaatatcaaaatatgatggttccatatttgttgagaaagaattccctaacattgagtatttagcagacggaccggcagtatataattttaagtcttataaaactttatctctgcccggtgcttacagcgtggacaagtactatcgtctagccagacatttgacgtggtataaggatgagcaattagatgaaaaagaaatggaactcggaaggaatttgtgcagaaatgaggcaccgtttgatttagtactttcgcatacatgcccatatctatatgaaccaaccgatttgtttcttgcaggacttgatcagagcacggttgattcaaccatggaaaggtatctgggcgagatagaatttaatttggattataagagatgggcctttggacattttcatgccgaccggctgtatccatgggctgatggcagacagatgctgatgctattcaacgaaaatgttgtaaatctggataaatttatgaatatgaccgaaaaacagtcatttaaagatattattgcataaaagagcaaatgtggcacaaaagcctaaaccgcatcaattctttgcaggaactttattcgtgaacaccacccttcttccagcattgttttatatggaagctccaaaatttgctattgtcataaagtaaatattgattgagaaattagtgtaaagaggttataattaaatcaagaaatgataatttttgtaaggtaatgaggaaaggcggtgtatcacatgactatgttacaggagcaggctgttcggatgattcaggatatgtccgatgataatgtaggttttttactcgaagtgattcaacgattaataccaaagaaaacatataccagtgttatttatccgtctcagaaatccgatgaaaaaatgcaggcgtttaaagaactggtagcgacaagatatgaggcaaaaaaatatttgccggatgactttgatccggatgtagagttggaagccgcaagaaaggaaagatatggtagtattgattgatacgaatgtaattattgattttcttgttgcaagagaaccgttttatgaaagtctcggtagaaacaagaagatatggtttaatatatcaaataaataacataattgaggcacggagtattaattccgtgcctcaattgttttatccggattacctttctgttgtaaaataaagggcgttatttcagtgcagatataattttgaaatatggcttgaaaaggctgtaatatttcagaccatctgtttcaccgtagctctttgtgatggcagatcttatgccattgagattctttgttttattcttgtttttttcaagaaaatcaacaaaatttccgggatcattaatatcactgtgtgcgaaaattatacctgtaaaacgctctaccttctttttacgcgtgagcttttcaggcgtaaaagagtaggatttgtcttttatggttttataaattgtctgaccctgtttcataccataaacatgaaccagcgtctcatgaagcttgagcagattgtcttttcccatgcagtttaggaaagaatctacctcaaaatggtcgaagtcttcggatactgccgagacttcagaaatatctgatatatcaatgctgtccgttgagaatttagcctcatctgcttcgtttttatttgagctgttaccagaaccgttatgaggtgtctgttcgtcagtgaatggtaagtcgtcattagccataagcttatcacttgacggtaagtcatcgttagttgcaagctcatcacctaacggttcactgtctgtatagctgctatgattgccatcgataagttcattcagattgtaagactttgcggtgatagcatcggtatcagtatcggtattgatattgttattggcgttatcttccttggagggaatatctgctactacctgatacttgatgttttttcttcgctggacagcctgtttgcagaaatttacattgaatctgcgtacagcgaatcccttatctttccagaaccttacagcagggtcatagcctgtgtcattgctcattatgatgtactcatcagcacatgactcggctgatgcagcatcacatttgttttcactgaatgaaccagtgcatcccatcagatatcccatatatgatacgagctgaaaatcaagggcattcgtgccctcataggatttctcaaatcggatatttattttgttattttccataagcctgatgactgacatgtatgacatgtgaggggatttcttagtgtaaaaaacaataatttcgtcgtcctcatctgccatatcaaacagcatcagccagttgtcgttgacattttcgctgtctactaaaaagtgtctgataataatcaccattaatccggacaaaggtattgtagcatgtgtaggagaaaatggcaaataatatagatttaagtaaatgttaacaatacaaagagtgcaacatatgatataattttaatatatcttgaaaatgaagggggaatagagttggcagatattgaaataaataaatcagatattgatgaagttaatgatgtgatacaagaaacagatgaagaagcatatgcgttggattctgaatttacagaggaaaaggaatataaaacagtacagaaatatgagcttgtgacgattctgtcgtatcttataggtgtcagaaatgagatacttgatcatatgtgcagtgatgagtatgtggagcttttaaacagcttaagagaaaataaaaatgcgaggatactcagatatctgtgtaaggcgcgtacaggtctgctgcgcaactataaaaaaacagacaatgaaataaaatataatctgggtaatataaacaggatggagtggtttgatgcagagaatataaataagcttgagagctgggaagtgcatattatattgtataattcatcggctgacaagtattgcgtacatattaacaagctgataaatgagcacgtggatgcatgtaaaaagcttttcccagactggataaaatgggagtatatcagggatttgtttgtcatagtggattatgaaaagccaaagaagctaaaggcagagtttactgtctataaagagcacagaaaagagtatccatatgggatgtatatccactggcgcccggatggcaggggaaatttgctcaattctgacggaaggattttaaagacaatatacagacagcatggtgattatttcaacgacggttcaaaatacagggatgcagtggaagatacaaaggaaaatatatatgagtttatccgtgaaagtatgcgtgttgtgatagttgtggattgtgaaaattctgatgtatacaagctgtatggagtattaaaaaacttaaattctgagcaaatgtccaaaatagaaaaaattatactttatgatgattatcatacatcctgtggatgggactggctggaaaaattcatacatatccctgtattccacgaggaggtggaacgtgtgacagaccgaaagtcgcttgttgatataaagatgactgcgggagtgtgtgaggcgtattataaggacaacatagactcgtttattttgtgctcaagtgattcggattactggggacttatttcatcggtaaaggatgctcatttcctcgtgatgtacgaatatagcaagtgcggacagtcaatcaaggatgcacttacaaaaagatgtatatttcattgttcaatagacgatttctatacaggaaatgcaagtgatttaaagaaaaaagtcatgataagtgaattgaaaaatctgacaaatgatattgtcggaaaaaatggctgggagatgacaagacagatatacgagaggactaaaattacatcgacagagcgagaaatgaaggatttttacaataaatatgttaagtcattgaggttaaaaattaatgaggacggagtattcgagattgtggtcaatgaatattgattatcgtaaaactgttttatgtaattattgtcggtcacacatgtattgtgtgaaggttaagccttattttagcggaaagagtgggaaagtatgatgaaaccgatgcttgaaatctgctgtggcagcttttcggatgtgaaaacagcatatgaaaatggtgcggacagggttgaactgaacagtgccctatatatgggagggctgacacctacactcgccaatttaatatatgcaaaggaaaaatgcaatataccggtagtgacaatggttcgtccaaggggcggcggattttgctattcggatgaagaatacgacattatgcttatggatgcaaaaattcttttagagcatggagcagacggtattgcgtttggatttctgacagaggaaaaaatgcttgacaaaaagcgcacgaaggaaatgatagagctcattcatgagtatggcagggaagctgtgtttcaccgcgcctttgattgcatagataatcaggacagtgcagcggagaggcttattaggcttggcgcagatcgtattctcacaagcggtggcgcagcaaatgtatgggatggcagaaaacagcttaagcatcttcaaaatcaatatggaaaagatattacgattctggcaggaagcggcgtgaatgataccaatgtgagagcacttattgaatacacgggtattacgcaggtacacagctcgtgtggctcatggaagtgtgatgtgacagcagcgggcaatgcagtggatttctcgtatgatgaagcgatgaagaactgctatcagtgtgcggatgcaggtaaggttaggaagcttgcggaagaggtaagtggagaggacagaatctgctcggctttgcacttatgattgtgagagatgaaatataaaaataataaactgtttgattgtacgataatacaagatttatgttacactctatccaattacaaacaaatagtacagatatataaggaaacagagacatgattaaaggacttaatattagcaaaaagtataaaaaatttgaattacagcctacatcaattgagattgacaaaggtgaaattgttgcattgattggagaaaatggagcaggtaaatcaacattaatcaagtgcatgtgcggagtaattgatgcagatgagggacaacttgaagtagatgatcaggtggtaaaaaaattagacgatgttttggttcttggatttatgaatcaggatcaaaatgtttacaatgaaatcaaaattcgagatttgacgaattttgtaaaagatgtaatgaagaaaaaatttgatcaggaagtatattattactactttaaagaggtatttcagttggatgatgattataagatgaaagaactttcaacaggaatgaaggttaaatattttttgagtttggaactcgcaaagagtcccgatttattggtacttgatgaaccaacctcaggattagatccaattgttcgtgatgaagtcttagatattctaagatgtgttgcaaaagaaaaaaatacttccgtgttattctcgtcacatattacagaagatatcgaaaaaatagcagatagagttattttcataaataatggacgtattgtattacaaggtgataaaaaagaaataaagaaaaaatatgtcaagttaaatcagcaacagtatgttattcttgtgaatgcagggatggcaaaagaatgtgtttcaatccatgattactatattgtggatcgtgatttggcaatgacttgcaatgtagaagtaaaggaagctttattaagcgatatactttcatatatgagaaagaggagtgaggactaatatgtttgcattaattaaaaaagatattatatttacaaaaaaatggattctattatctgtagtttatgcagtggtggccacctggcttataatgcatgaaggcgctacaaatattttgttcacattttttttagtgcctttttttgtaacatcacttccatttactaaaattatgagtattgaggataacagtgatacacgtgattttattcgaagattaccggtatcaaaatatttagttgtattctcgagagcagtgtttattctttttatgttattaatttcttcaataagcttatttgttatacaaacaattggctttaatgtagaatataatacagatatgctaataaaaatagcttccataattttgatttttttgttgtattttatgcttcaattaggtgttttttataaatattcatatcatgcatcacaatcaatcctggtaattatttcctttgctgtaatagtgcttgggtttataacagaaaatatagatttagtgaaatattttaagaattttgattggtcgatattgttatttattatggctataataaatgtggtagtttattttattgataccaaattgtatgcaggaaaataattataagtatggctcgattactttactgagcatcagaatataggaataaaataatatcagaagatttggacttgaataatacatatacaattaaataccggattgtgttataatatgtctgtcggcggattcgtcggcagactttttttaaggagagtaaaatgagagtattaacagatttagagccaaagaacgttttttcgtttttcgaggatatatgcagtattcctcatccatcatacaaggaagagaaaatcagtaattatctggtggagtttgcaaaggcaagaggccttgagcattaccaggatgagcttcacaatgtgataatcataaaggaagcatcagaaggatacgaggatgtggagccaatcatactgcaggggcacatggatatggtttgcgagaaggcacctgactgtgataaggatatggacgaggaaggcctggaccttttgatagatggtgattttatctcggcaaagggcactacactcggtggagatgacggtatcgcggtggcatatgcgcttgctattttggacgatgacagcctgtcacatccacgccttgagtttgtatgcactgtatgcgaggaggtcggcatggagggtgctacaggcatcgatgtgtctatgcttaagggaaagaagcttcttaatatggacagcgaggaggagggcgtgatgctcgcaagctgcgccggtggatgcagagccgatgtgaagctgcctgtagagagagagacagtgagcggaacaaagcttattgtgagcttatcaggtctcaccggcggacactcaggctcagagattgataagggaaggggcaatgccaatactcttatgtccagactgcttcgcgacgcatcggcacctgtagctatagcttctatagatggcggcagaaaggataatgccattccaagagagtgtactgcacagattattgtagcacctgatgaggctgcggcagtgaaggcttcgatagaacaggcagcagctgagattgcggaggagtttaaggcatctgatcctgaccttaagcttgctgtgtcagaggagactgactgcagtgagtcagctataagtgcaaaggacagcgcaagggttatcgcacttatcgaggcactgccaaacggcatcatcagaatgagccgggaaatcgataagcttgttgagacctcgcttaatctgggagttttaaaatcagacgatgctgctgtcactttaagatacgcagtcagaagctcagtcggtgtggctaaaaaaagccttaagaaccagcttgtctgcatagcaggcgcttttgctgcagaggttacatttgagggtgattatcctgcatgggagtacaagaaggattcaaagctccgcgaggatatggtacggatttttgaggagatgtatggcaaaaagcctacagttgaggctattcatgccggtgtcgagtgcggacttttaagcggcaagattgaaggactcgactgcatatcaatgggaccggacatgtatgatatccatacgacagaggagaggctttcaatatcctctgcaaagaggtcatatgagtatatactcagagtgattgcgtgcaaataaatatttattcaaggcttttgataaaggaaagaggtgtcatatgatacctctttttaaatgccctgtgaaaatagctcagattgtgaaatccgacagacagtgagacatctaaaattgaggtgttgccgcgctcgaactgttccacggatttttcaagacgcacattgttgatatactgcacgcaggtcatgttcatgtgttttttgaagaaacgcatgaagtggtattcactgaaatagcaaagcccggcaagctctgaaacatggatgctttcggcatagtgcacctcgatgtaatcgagcacatttttgagcttatcggaggatgtgttgacaccgaaatcagcatttttttcactgtattgcagcaatagaaatattgcctgaagcagaaatgcctttagagccagctcatagccgaattcctgactggagtatagctttgttatgcgcatgaagcatttgcaaagggatgaatatgccggatgcttcggtgcaatcaggtaaggcatggcgaactcatggttgattagcggagtcagatatcttgaagagcatatatcggtattgtttccacctaaaaaattgatatggaatacatacgtttccgagtaaaattcgtcgcagtcccttattgaaatggaatgcagcagcagtggcgggataaagatgatatcgccttcctttgcttcatattcgagcaaatcaatctgataggtgcatgagccctttgtaatcagtgtgagctctgcctcatcgtgccagtgtgtagtgatgacagggtaatctgctgcaagtcttgttatatatttctgaacggggaaaaatacttctccgtgctttgcgttttctttctgcccgagggcaggcggattattgtttttcatattgttgtttctccatagcttttaaaaatataccctttaaaattataagagcagtattgtgttataaaatgaaaaaatattgcaagaatttatactaatcactttctataatagcagtataatacatcaagacaaagtgctcaagatgtaaatgagaacaaaatttatgattagataagaggtacacattatggagagaaaatggtggcatgacaaggtggcatatcagatttatccaaagagctttctggatacaaacggtgacggaataggagatttaagaggtatcatttcaaagctggattatttaaaatcgcttggaattgacatcatatggctgtctccgatatataaatcgccatttgtggatcagggatatgacatatctgattactatgcgatagcggaagaattcggtactatggaggagtttgatgagctccttgccgaggcaaagaagcgtgatatgcacatcatcatggatctggtaataaatcactgctcggataagcacgaatggtttcaaaaggcacttaaggatccggatggagagtatgctgattacttttatttcagaaaaggtaaaaacggcaatccgccgagcaattaccgctcttattttggcggaagctgctgggagaaggtgccgggcacggacaagtattatctgcacatgtttgcgaaggagcagccggatttaaactgggagaatgaaaagctaagacaaaagctttatgagatgattaactggtggcttgataagggcttgtcaggatttagaatagatgcgataatcaatataaagaaaaatctcgatttccctgattttgagccggatgcagaggacggactggctgcctgctacaagatggttgaaagtgcagaaggtgtcggagagctcttagaggaattaaagaacaatacatttaagaagtatgatgcatttacggttggcgaggtattcaatatgaagcctgaggagctgccggagtttatcggtgagaatgggcatttttcaacgatatttgatttttgtgcacagtgcttaagtgatggagagcatggttggtatgatgcaccgaaaatagattttgacacatggagaaagaccattcttggttcacagcttgagacagaaaagtacggctttaaggccaatatcatagaaaatcatgatgagccgagaggtgcctcaagatttttaccaaagcatgctcaaaatcctgccggaataaagatgttaggaactgtcagcgtactgcttcgaggcattccgtttatataccagggacaggaaatcggtatgcaaaatgctaaatggaacagtatagatgagtatgacgatatcagcacaaaggatcagtacaaggcagcacttgcagcaggcttatcagaggagcaggcacttgcagcctgtggaaggatgagcagggataatgcaaggacacctatgcagtggagtgatgaggcaaatgccggttttaccacagcaaagccatggcttaaggtcaatgaaaactataaggctatcaatgttgcggcgcaggaaaaggacccttcatctgttttgaactattacagaaggcttgtggcactcagaaagtcagatgaatttaaggagctgttcacctacggcagatgtgttccggcatatgaggatacagatggcatcatggcttattacagagaggatgaaaataagcgcgtgctggttgtggcaaattttggcagtaaagaggcacaaatcaggctggatggcagtgtgaaaaaggtgcttttgtccaacacaaatgatgctgaaaagagcactgtttcagtgggagcatctgagcttaagcttgaaagctgtgaggttttggtggtgcttgtaaaatagcataatttgatacagcattaaagaaaccaggctgaatttttacaaaaagagacagctaaaagagataacaaaaagagataatgaagagacaaggagggcataatgagcaaaaacaataacgaaaaatggtggaaaaaggcggtagtttaccagatttatccaaagagctttcaggattctaacggagacggctttggtgatttacagggtatcatcaaaagacttgattatcttgagacgcttggaatcaatgtaatatggctttcgccggtattcaaatcaccgcaggcggacaacggttatgacatttcggattacagggatattgatccgacgtttggcagtctcgatgatatggaggagctcataaacgaggcaaagaagcacaatataaggattatgatggatcttgtcttaaatcattcttcaaacgagcacaggtggttcaaggaggctaaaaagagcaaggacaatccataccatgactactatatttggagagacggagatgaaggcgtgccgccaagtgatatgaaggcttgtttcggtggaagcgcatgggaatatgtgccggaaatcggacagtattatttccatcagtttttaccggagcagccggatttaaactgggagaatccaaaggtcagaagagcaatctacgatatgattcgctggtggatggacaagggagtcggcggcttcagaatggatgtaatcgaccagatagccaaggagccggacaagagaatcaccataaacggaccaagacttcaggaatattttaaggagatgagtaaggagaccttccaaaagggtgatctgatcaccgtaggtgaggcctggggcgcagacacggagcgcgcaaagctttacagcaatccggatggcagcgagttttccatggtgttccagttcgagcacatagggcttgaccagaaggagggcggcgagaaatgggaccttgcaccgcttccgtttaaaaagctcaaaacgacaatggctcactggcagaatgagctctacaactgtggctggaacagtctgttctgggacaatcatgacctgccgcgtatcgtgtcaagatggggcaatgacagagagtacagagtggaatcagcaaagatgcttgccatattgctgcacggcatgcagggtacaccgtacatctatcagggcgaggagcttggcatgacaaatgtacagtatgatatcgaggattataaggattgtgaaatcataaacatgtaccatgagcgccttgaaaaaggatactcaaaggacgaaatcatgaagtccatttacgcaaaaggacgtgacaatgcaaggacacctatgcagtgggatgactcggaaaatgcaggcttcaccacaggaacaccttggataaaggtaaatgacaattacgataaaataaatgccaaatcacaggtggatgaccctgattcaatttttagctgctacaagaagcttgttcagctgagaaaggattatccggtatttgttgatggtaagtttacacttttacttgaggatgatgaaaatatttttgcatacagcagaaagaatgaagaaaagaccatgattgttgtgtgcaatttctttgacaaggagataccaatgccgcttgcaaaggagtgcgagggtatggaggtgctgatttcaaattataaggatacctctgatatgtcagtgctcagaccatatgaggcaaggatgtatatacgataagtaaaatattgataccgtctgtttttataaaaggtgttttataaaagcaggcggtattgttgtattttttaaagataatgtatataataagttaccgaaaaaattcaagggacgatgaaaggaaccaattccatgtttgatataataataataggcagtggtccggcagggctgtcagcagcaatatatgcaaagagagccaatctgaatgtggcagtagcagaaaaagaatacgagggaacaggccagatagccgagagcggaaatgtgaacaactatctggggcttccaaacataaacggatacgacctgggagaaaaattcagggagcatgcagtgtctcttgatgtagaatttatcgaaaaagaagcagtacagatagaagcagtgcaaaatggtgagaaagaagaatcagcgatatacagagtgaaattcgatgatgacacgatagcagaggcaagagcgctcatctataccgcaggagcatatccgagaaaggcaggagtgccgggagaggctgagtataccggaaagggagtatcttactgcgcaatctgtgacggagcattctataaaggaaagacagccgcagtgctgggcggcggagataccgctttggatgatgcattatatctgtccgatatatgtgagaaggtctatctggttcacagaagagacagcttccgcggggcacagagcacagtagagctcttaaagcagaaagaaaatgtagagcttgtcctaaacgaagcagtgacagaaatatatggagaaaaaaagccgacaggcataaagcttaaaagtggcaggacactggctgtagacggagtattcgtggcatatggctcagtaccgcagtcagagcttataaagaatctggtacagctcgatgagagaggatatgtagtggcaggtgaggacggcatcacatatgctgcaacaaaaaatggtgaccatgatagaagcgtccagccgggactgtatgtggcgggagatgtccgtaccaagacactgcgtcaggtggtaactgcagtatctgacggagcaaatgccgcaacgacagccgcagagtatttaagggacattaatggctataaacaaaatatataaccacgcacaaataatttgtataactgatagcattgactttcaacacacacgtttgtataataatctcatcaattcctagtaacacaatagactatgtaagaattaacgagaagaagaaaacaatgagatttaatacaagcttacttcatgccggcgtgacaaaagagacaaatggctctacactgccaccggtatatcagacaagcgccttcgagcaggagagcgcggcagatctggaaaaaatatttgaaaacaaagctccgggctactgttacacaagagttgccaatcctacgattacagcttttgagaacagaataacaaagctcgagggaggaatagcatcggtggcatgcgcatcaggaatggcggcactgatgaataccttcttaaatatactaagcagtggagatgagctaatctcaagtgcaagcctctacggtggcacaatagatttgttccatgatcttgaggccttcggcatcacaaccagatatgtcgagaacaacaactggcagcagatagaggacagcatcaatgagcataccagactgatttttgcagagactatcggtaatccctgtctggatgtcacagatattgagaagcttgcagagatagcacacgcacatgatataccgcttgtagttgacaataccacatcgacagcttacctgatacaggttttaaagcatggagctgatatcgtggtcaattcatcttccaaatatatcaatggaagcagcaatgcaatcagtggtattctgacagactcaggtaagttcaaatgggacaagaacagatacccagggtttgcagattatgtgaagtatggacctatggcatttgtcgcaaagctgagaaatagtcttttcagaaatatgggtgcctgtttagctccggtgaatgcatacttaaatattataggacttgagacactcggtcttagaatggaaagagaatgctctaatgcactcgagcttgcgtcgtggatagaaaacaattatcctgacataagggttaattatccggggctttgtagcagcaaatggcatgaaatagcaaaaaaacagctcacaaacggctatggagcaatccttacaatcagggttggcagcaaggaaaaggcatttaaatttatagacagcctgatgattccatacacactcagcaatatcggagatacaaagacacttgtcattcatccgggctccacaatcagtcttcacagcacagataagcagaaggaggatgcaggagtatttgaggatcttataagagtcagcgtgggtatcgaggatatagatgacctcaaggaggattttgcacaggcttttgcaaatatagctgattaagccgttataataaggtatcaatgtgtatgcaaatgagagcgtgcatatgcatttacatataaaacaaaacattaacatatttacacagtaaggagactaaaaatggcggagaaagttgattacgcggccctaaaaaagggtggatttatgagacagaagcaaaagtgctgtttctcgcttagaattgcggttgtaggaggaaatcttacagcagaaaatatcaaaacagtagcagaggttgctgagaaatatggacacggatatgttcatatgacatcgcgtcagggtattgagattccttttatcaaggttgaggatatcaatgtggtaaaagagaaactggcaaagggcggtgtaggaacaggtgtctgcggaccgagagtacgtactgtcacagcgtgtcagggctcagaaatctgtcctagcggatgtatcgatacatacactctggctaaggaacttgatgaaagatacttcggaagagagcttcctcacaagttcaagtttggtgtcacaggctgtcagaacaactgcttaaaggccgaggaaaacgatgtcggaatcaagggcggcatgacagtagagtgcagccatgacgattgtatccagtgtggtgtatgtgtgaaggcatgccgcgagggtgcactttcgatggaggatggcaggattgtcatcgacagagacaaatgtaacaactgtgcgcgctgcgtaaagagctgtccgacagatgcatggaagggaactccgggatatatcgtatcgtttggaggacttttcggaaaccacatctataaaggagagcagtttgttccgattatccgcgacaaggaaactcttttcagagtgacagatgcagcaattagtttcttcgagaagcatgcaaacggtggtgagcgtttcagacttactcttcagagagtgggcgaggaagagttcaaaaaagagattcaggcagcatacgagggtaaataatccccatgtatagcagaaaatatccggcatgcataaacaacaacggttacggcaaaaatataataaatatgagtataggaagggagatgcaaaatggcagatatagcattcgacgatcaggtagatataactgacaaggtttgccctcttacatttgtaaaggcaaaggtagcaatagaggaattagatgacggtgaggtgcttgcaatccgtatgaatgatggagagccggtacagaatgttccaagaagcatgaaggaagagggacacaagatacttaagctcgaggacaacgaggatggaacatacactctttacgtcagaaaggttgaggactaattatggcagcaagaatttcaaaggctgatttcgatgaaaaagtattaaaaagcaagcttccggtaattgttgatttttactcggattcatgtgtggcctgcaagaagctggcaccggttctcggagatatcgaggatgattatgaggataagcttcacgtatacaaggtcaacacaaactttgacggagagctcgctgatgagtatgaggtgactgcgaatccgacactgcttttcgtaaaagacgcagaggtcttagacagaaaggtcggcgcacaaaagcctgccgatttgaaagcgtgggttgaagcattattatagtttttagattattatataaagcagtctgatacaggataataacacatacagataccacaatctgtgacacaggaggaaataaaatgactatcacagtagcaggagagaagaaagaatataaggatggacttacattaccggagcttatcgagcttgagaatgtagatatgcctgagtatgtaacagtttcaataaatgaggaatttgttgccacagaggataagccaaagacagtgcttaaggatggcgacaatgtagagttcctttacttcatgggaggtggatgctaatggcaatgacggatgagcagatcgagcgctattcacgccacattatccttaatgaggtgggcgttaaagggcagaagaaattattaaagggcaaggtgcttattatcggtgccggcggactcggagctccggcagcaatgtatcttgcagcagcaggagttggcacaatcggtattgtggatgcggatgaggtagatttatccaacctgcagagacagattatccacggaacagtcgatgtgggaaaagccaaggtaaagtcagcaaaagagacaataaacgccatgaacccggacgttcaggtcaatacataccgtatgtttgtagatgcgtcaaacatcagagagcttatcagggattatgatttcatcatcgatggaactgacaatttcccggcaaagttcttaatcaacgatgcatgtgtgcttgagaaaaagccgttttcacatgcaggaatcatccgtttcaagggtcagctcatgacatatgtgccgggagagggaccttgctacagatgtgtattcaagaatccgccaccaaaggatgcagtgcctacatgtaagcaggcaggcgttatcggagctatgggcggagtaatcggttcgcttcaggctatggaggctatcaagtatttaatcggtgttggagagctgcttacaggatatctgcttacatatgatgcactcaccatggagttccacaagattaagcttccaaaggatacacacaactgtgcagtctgtggcgaccatccgactattctcgagccaatcgactacgagcaggaggtctgcgaggagacagcgggcagatttgatgcacctcgtacacaggaataaaaagacagtaaggaaaggaacgatatgagtatcataagaatgaaatatccgtttctggatgaaatagcaaaatatgctaaagagcatctgccggaggaggcgtgcggtatgatagcaggcagtgaggacgaaaacggtcgtctcatcacaaaggtatattacctgacgaatacagaccatgccgaggaccatttcacaatggatccaaaggagcagctggcagccataaaggacatgagagcaaacggccttaagccgcttggtaactggcattcacatccgtctagcccttcaaggccatcggatgaggatataaagcttgcatacgatccaaatgcgagctacatgataatgtcgcttatggcagaaaatcctgtaatcaactcgtttcatatcgagggtggacaggtcacgaaagaggatttacgaatatattctgatgaatattacttctaaatcatatgttaatgttttgagtcgcagcgaaagctgcaaagaaaagtcagcttcatcgaagatggcttttcttttttagagaaagatgttattatagcatgtatatttaataaaacgaaagagcgtgcgaaaatgaaattaaaaacgaaggaacttacaacatgtgcactttttgcggcgcttatagcagttggagcatttatcaagattgatattccgcttcctatgtacaccatgcattttacattacagtggttttttgtgctgatggcgggatttctgctcgtggcaaagctggcatcgcttagcgtaatagtatatttgtgcatcggactggtgggagtgcctgtatttgcggcaggcggtggtcctacatacattttaagaccgggctttgggttcctcttaggctttgtgcttgccgcatttttaatcggagccatcacggaaaagcttaaaaagaccaatgcgtttacactcattcttccggcaacggtcggactggtggcatattatacagttggagcaatatacttttactgcatgaagaatttctatgcggcaacacctgtcagctggggcatcgtaatagtagattactgtctgataactgttgcaccggactttatattatgcgtatcggcagcagtgttttctgccaagcttcgtcctgtttttgaaggaatgctcaatggatacagtgtgaagcataaggcaaaaaataaagcataaagcgtataataaagtataaaataaggcatgaaatatatatgaaataaagtatggatatggtattacagggagataaaaatggcgtattttccgatgtttgtggatatgacggaaagagagtgtctgatcgtcggcggtggaaatgtggcataccgcaaggtgattgtaatgctggattttggcgcgaaggtcacggttgtagcagagaatatatgtgatgagctgagaaagcttacaattgatgatatagcaagcgaggataaaacgggctcatatacggcaaatatagaaaacaataagacggattcagatgcagctgacagaattacgattataaaaagaaagtttaatcaaaaagactgtgacggcatggaaatggttatcgctgccactgatgacaatgctttaaatcatgagattgcagagtattgcaaagctaatggcatcatggtaaatgcggtcgatcagaaggctgattgcagctttatttttccgtcatacataaaggaaaagaatcttgttgcggcattttcgagcggaggaaacagccctgtgctgactcagtatctgaaagacaaagagcaggagattcttactccgtttcttggtgagctgaacgaatacatgggacagatccgcgaaagagtaatagcgcaatatgacacggaagccgagagaaagcgtgtgtttaaagaaatattgtgtgcagctattgataatggaaggattccggaaatatagtttaaagtatggtattacagattttaagttgttgttcatttataaatgataaatggaaaatggcatgatccgtaggagagtaaaatgaggtatttaataggaacgagaggctcaaagcttgctcttgttcagactgattacgtgatagataagttaaaaagagcatatccggatgatgattttaaggctgttatcataaagacaacaggcgatttagagcagaaaaaggcactcgataagattggctcaaagggtatcttcgtaaaggagatagaggacgagcttttatcgggaaagattcatatggcagtccattccatgaaggatatgcctgatgaaccggcagcagggcttacatttgcaaaggcatggaagcgtgaagatccaagggatgttttggtgctaaaaaatgccgcttcactggatgaacttcctcatggtgccgtgataggaaccggaagcaagcgcagaaagtatcagcttttaaagctgcgtcctgaccttaaggtggttggcatacgcggaaatatcgatacgaggcttcgtaagctatatgatggtgaaattatatatgaagaggttgccgataatactgtaaataacaatgagatagctaacgaaaaacagaataagtataacgaatacaggctggatggaatcgtacttgcagcggcgggaataaagcgtatcggaagagattctgagatcacacagtacttttcagaggatgatatgattccggccccggcacagggcacactggcgcttgagctacgtgctgacaatgctaagctgatggcaaagcttgatgctttgtcagatgagaaaaccaatctgtgcgcaggcattgagagagaatttttaaagcgaatcggtggaaactgtcatctgcctgtggctgcatactgtgatattgtaagtgaaaaagaccgcggtaatgacagcaacaaaaataacaggctaaagcttcttgcgatgtttggctcggaggatggaaaacagctagcaaggacagagcaggtatgggatatgacatcagacagaaacgatattgtggagcgtgcggtgcgcgatattcggtataaattagaaatcgactaaaaaaatatcaagtcataatttttaatcataataattcagtagaaaaataattaggaaaatcatgagagaaaacacaggaaaagtagtattagttggagcaggaccgggagatacgggcctgctcactttaaaaggagaaaaatatataaaacaggcggattgtctggtgtatgacaggctgtcatcaccagagtttctttcaatggcaaaggcaggctgtgagcttatttatgtgggcaaggaaaatcacaaccatgtcatgaagcaggatgccataaacgagcttttgtacgagaaatcaaaatatcatgagcttgtagtccgtttaaagggcggagatccgtatgtctttggaagaggcggagaggaagctctctacctggtagatagaaatgtagaggtagaagtggtaccgggtgtcagttcatcggttgcagcgcttgcggctgcaggaatacctatcacacacagaggcatagcaaaaggctttcaggtcatcactgcgcacagcagaaaggatgaggaggcagatatagactattcccttcttacagatgagacaatcacctgcgtatttttgatgggacttgcgcatgtaaaaagcattgcagcagggcttatgaaagcaggacgaagagcggatactccggcagcagtgatatcgaacggcacacttgccgcgcagcgcaaatgtataggaacgcttgcggatatcggagaaaagattgaggaagcaaagctgatatcaccggctataatcgttgtgggagatgtggtttcactgaatgacaggcttgatttctttgaaaaaagaccgctgtttggaagaaaaatcacagtaccgtatatcaaaacaaacgaattgatagcaaaattacagcagcttggagcagacatcacatcggttaagacaggcataattaaaccagttataattcctaaatttgttgataaggtaagatcagctgattggatagtttttacaagcaaaaatggtgtaagatcatttttctataatctggatctggcaggggctgacatcaggcttatagcaaatgcaaggttcgcagtggtgggaaaagctacagaaaaagagcttgcaaagcatcacataaatgcagatattattccggcagaacagaccggaaaaggacttgcagatgcaatgaaattatgtatgccgtatgtctatgggaaaagtgatgaggatacatttgatttagggaaaaatagtacattggatttaagcaatggtaatatatctgataaaatgtgcaaagtctgcattttctcggcaaaggaggcttcacctgaccttgaggcagggcttaaagaaatatgtgaattagaaaaaattgatgcatatgtaaatgagcaggcatatgagagtattcctgaaagcattggaaacatggtaggtgaagctgtttttacaagcgcatcaaatgtggaaagattttttcatatgctgccggagaatgcatacgtggaaacagcatactcgataggtgaaaaaacaacagcagcattagagcagcacaatgtcagagagatactgcaagctgatgacagcagttatgaagcgctgatagataaaatatcttataaagatgcttttaaagattaagaatttatggtgacaaaagttatataaagttatataataaatgcaaagttatataaggctatataaacttatatacgaaacaaaaagttatataaagttatataagaggaaaacaaaatgcaaaatccatttacattatcattcgggaaaaaaccactgcaatatatatcaagaatctcacagaccaatcagatagtagagacatttaggtcagaaaatcctgcaaaccagctttttatgataaccggggtaaggggatcgggcaaaacggttatgatgaccaatatagtatcggagataaagaaggatgaggaatggctgacagttgagcttaaccctacgagagatatgcttcagagccttgcagccaagatttacagtatgcctcagatgaataaaatatttgtcaatgcaaaacttgatttttcagcgtttggactgggcgtttccatagaaaatgcagcaccggttacggatatagaaaatgtgctggaattgatgcttgaaaatataaagaaacataataagcggttactcatttcagttgatgaggttacgaactgtgaatttgtaaaagtatttgtcagttcatttcagatatttctgagacaggattatcctatttttctgcttatgacggggctgtttgaaaatatatatgatctgcagaatgacaaggcacttacatttttgtacagagcgcctaagataatgcttgagccacttagctttacagcagtcaggaaacactatatggatatttttgaactggatcaaagcgaggcagacaaaatggcagctcttacaaagggatatccttttgcatttcaggtattgggatatctttactgggaaaacagggatgatcacacgatagaagatattttaccggaatatgatcagtgccttgatgagtatgtgtacagtaaaatctggtcggagctgtcagagcttgataaaaaaatattgttggaaatatcagtaagtggtgaagaaaaggtaaaagaaatcagagaaaaactggatatgaattcaggattattctcggtatatagagaccggctcaaaagaaagggggttatagatacctctgagtacggtaaaattactctcacacttccacgatttgaagaatttgtcaaaacgcgccaaatgtaatatactatatccaactgaaacattaacataataaaggagaagcacaatgaaagaatacagtataggtacaaagtgtgtacaggcaggctatgcagccggaaacggagagccgagacagattccgattattcagtcaactacattcaaatatgacacaagcgaggacatgggaaagctttttgaccttgaggcagagggctatttctacagcagactgcagaatccaacctgtgatacggtagcaagaaaaatcgcagctatggagggtggcactgctgccatgctcacatcatcaggacaggcagccaatttctatgccatgttcaacatatgtgagtgcggagaccatatcgtggcatcatcatccatctatggaggcaccttcaacctcatcgcggtaactatggcaaagatgggtattacagctacattcgtatctcctgatgctacagaggaggagctgaatgcagcattcagaccgaacacaaagcttatgtttggtgagactattgccaatcctgcgcttacggtgcttgatatagagctttttgcaaaggtggcacacgagcacggagtaccgcttatagtggacaataccttcccgacacctgtaaactgcagaccaattgagtggggcgcagatattgtcacacactctaccacaaagtacatggacggacacggagccacactcggcggagcaatcgtagacagcggcaaattcgactggatggcacatgcagataaatatccgggactgtgcacacctgacgacagctatcatggcatcacatatgcagagaaattcggcaaggaaggtgcgttcattaccaaatgtacagcacagcttatgcgcgattttggttctatgcagtcaccacagaatgcatttatgctgaatcttggccttgagtcacttcatgtgcgtatgccaaagcatgtggaaaatggacaggcagtggctgaatttttggaaaatcatccaaaggttgcctatgtaaactactcagggcttccttcaaacaaatactatgagagagcacagaagtatcttccaaacggaggctgcggagtcgtatcatttggcttaaagggcggcggagaggcagcgtctgcatttatgaaggcattaaggcttggtgcaatcgagacacatgtggcagatgcgagaacctgctgcttaaatccggcaacaagcacgcatcgtcagatgaatgatgagcagcttaaggaagcaggagtgccggcagagcttatcagaataagcttaggtcttgaggacaaggtggatttgattgcagatatctcaaacgcactcgacgctataaaataaaatatatattcataaaatacacaaaaagaacaaaattagtaaaaacaaaactttacgaaatgacttactaatgatatagtagtgataggtatgaaagagttttaataattattttatttttgtgggaattattatgagtaatagatttgatgatgaaaacaatatagagatggatataaagaccgcattcgcatcctggggaaagtatgtttttaagtgctttccgcaggaatgccgtttgaggtcttttttatcagaggattcattagatgactcagaagagaaaaatgtggatattataaacaatccgtttatagacagcatggttgacagggataatctgctgaaggctgttgaacagattgcagatggagaaaaatttgctactgtagtactgcatgccaaggaaggaaccgatacctacaggatatcattcaagtcgatttgctttgatgatgctggcagaacagttgaggcaatagggcttgctgagcagcttgatgagcgtcttaacgagagtgagatggtgaatgctttaggaagcaacttcaacagtatctactatgtagatgtagacaacaataagatgtatccgtacaggatgaatccttctgtccgtgctatgtttggagaagtgcttgagtcaaaaccgggctatcaagagatgatggaacagtatgtaaatgctatcgtcttagaggaggataagcttcacatgcttttagagacatcaattaataatctgcgcaggcagtttttgataaaggatacctatcagcatgattaccgcatcgtgagggatggacaggtacagtattgcagagccaagtttgtcaatgtgtctggcgtgggagagctgcacaagatgatagcgggcttttcggatataagcccggagaagcaaagagagcttgagcgtatagcgtatgtggatgcagtgaccggaggcaacaattacgagagctttaaaaagaagctgcgtgacagaaatgtatcaggatatctgatttccatggatattcactccttcaagatagtaaactccatctgtggcgtggcaaagggcgatgaggcgcttagatggatttctgaaaatatacgcggtgttgtaggatataatgacatatcaggtcatataaatgcagacagatttgttattttctttgcggatgacaagataaataaggttatcagaaagatagagaccatcaatttacagcttattaaggtttcagaatccttaaagattccaaagattcagccatactttggtgtgacaaaatgggagccgggcaaaaaggttgaggaagcatacggcgaggccaactttgccaagaatcggatcaaggagcggaaggacgtgctctatcagatatacagtcaggccgatacagaaaggattgtcgaagaaaagcagatggaggataacttctacagggatttaaatgacaatcattttgagatatggtatcagcccaagtatgctccaaagaccaacaagctggtcggtgcagagggacttgtcaggtggagaagagaaaataatgagattattccgccatccaaatttataccgctttttgaaagaaacggcatgattaaggcgcttgatgagtatgtgttccgcgaggtgtgtacacatcagagaagatggcttgatgaagggaaaaaaatagtccctatctcaatcaacctgtccagagcgagcctgtactttgagtctgtggttaaaagatatcatgatatagcaagaagaatcggcatatacacacatcttgtgcctatagagattacagagagtgcagcggttgataatgatgaaatcaagagtattgcggataaattccatggcaatggatttccacttttggtggatgattttggctcaggctattcatcacttgttaccctcaatatgaagtgctttgatacactcaaaatcgacaagagcctgattgactatataggagattcaaatggtgagaggctgcttgtgcacacgatagcactggccaaggagctgggaatctgcgtgaccgccgagggtgttgagagtcaggagcaggtagagtttttgaagaatatagactgcgacagtatacagggcttttattattcaaagccactgccgttaacagagtatgagatgcttttggattgataaatataaaaaatataagcagtataaaagagccggtcatgtgaccggctcttttgaggggagtataaataattaataagaggtataacattgaaaagatttctctcttcggaaacattataaaataacagtaattaaaaagcaatactttgaaacacaaaataatataattttaacaaaacgagttaatttattaaagagctaaagtactaaagcgccggctgtaatgattttggtgatttatcgcagttcacatctcataataaaatgaatatcataatgtaaattcgtattttggcgtatggatgtatgaaatttaaaatagtttatgcggatgagctttataaggtgcaaaaagaaatgaatgcactgcttatagatataagaacaagagaggaatatgacaggtcgcactggaaaggcgcactcagtatgcctatggatatcacggattcatatgagagtgaactcgatgcgtcacagagtgtgattttttactgcacgcatggtggaagcagcatgaagctggccagatatctgggaaatcgcggttttgatacagcgacagtcataggtggatacaatgctatgtgcggatatcaaaaaaagttgcagaaatatggctgaaactatttaaaaaaattgaaatttatgcaacaatattagataacaatgtaaagtacaattatagaaaggcagttacacaatatatgaatagatttgagcttgttgtgccatgtcattttggccttgaggcagtagtcaagagggagatatatgatctgggatatgagataacacgtgtggaggacggcagggtatcgtttgagggcgatgctgaggctatatgcagagcgaatatattcttaagaggcgcagagagagtattacttcaggtaggacgctttaaggctgccacatttgatgagctttttgaaaatgtaaaggctctcccatgggaaaattatattcccaaggacggcagattctgggtgaaaaaggcttcttccataaagagtaagcttttttcaccatctgatatacagtctatcgtgaaaaaggctatggttgagagaatgaagaggtcttatcacattgactggttcccggaggacggagcacagtatccggtaagggtttttctgtacaaggatgaggtgatggtgacacttgatacatcgggggattcccttcacaagagaggataccgtctggcaacgagcaaggcgccgctgactgagacacttgcagcatcgctcatcatgcttacaccatggcatgcagacagaatacttgtggatccgttttgcggcagtggtacatttccgatagaggcagccatgatggcagcaaacatagcacccggtatgaacagggagtttacagctgagagctggaccaatatcataccaagaaagctgtggtatgaggctgtgcaggaggcagaggatatgatagataaggatgtgcaggtggacatccagggctatgacattgaccctgatgtggtggctgcagccagggaaaatgccaagagagccggagtggagcacatgattcatttccagcagagggctgtggccgacctgcatcacccgaagaagtacggatttattatctcaaatcctccatacggtgagcgactcgaggagaaatcagcgctcccggcactgtattcacagattggagaagcttataagaggcttgatgcatggtcgatgtatctgattacgagctatgaggatacagagcgctatatcggcagaaaagctgacaaaaacaggaaaatctacaatggtatgataaagacatatttttatcagtttatggggcctaagcctccgagaaggaaaaaggattagcagggtatatgaaatattcaaagagatatattgcatttacattcatcttggcacttatctttgtgtctaatttttacatatatgcaaaggacagctctacacttggcgcgttcagaggagcccagatagataatactatatggagtccgcttgtggctgctgatgtaaatggcaccaccatcaggcttaggatagaaaataaggagtatacgagcgaggatgagcatgtgtatatggatgagaacaggaatataatggttcccgtgtctatgcttcgcgatgcactaaacagcagtgcacatgtatacaataaaaatgagcttctggtggaaaagcacagtctgacagctgatttcaagctggcagacgacaatggctttgtacagtataagggaaagttttatgcaagcttagacaagctgtctaaacttttggatatgacatgcagctttgatacggcgacaaatacactcactatgacagacaaatccgagggtgtatcaacggtgccaacaaagtatgatctgagggaaagacagcgtgtgtcactaatcagggatcagggcagctacggcacctgttgggcttttgcggccacaagcgcacttgagtcagcccttatgccggaggagcagcttttgttttccgtggatcatatgagtatgagcaattcattcaacgtcaatcagtatgacggtggagagtataccatgggaatggcatatctggcagcatggcagggaccggtttatgacgcggatgatccttacggagatggagtgacacgcgatgatcttgctgcagtaaagcatgtgcagcagatgcttatcatagatggaaaggactatcagggtataaaggaggctgttttcaaatatggtggtgtgcagacatcactttacagtacaatagcaagctcaaagacaaagacgccttattacaataagcagactaattcttactgttatatgggtcaagataagccaaatcatgatgtggttataattggctgggatgacaattaccctaaggaaaacttcaatgtggatctggaaggagatggagcctttatatgccagaacagctggggcagcagttttggagacaatggggtgttctatgtgtcatactacgatacaaatgtgggcacgcacaatgttgtttatacagatatagagagtgctgacaattatgataatatataccagagtgacctgtgtggctgggtaggaaagatgggctacgacaaggaggatatgtacggagccaacatatttaccgcacagtcggctgaatcactaagggcttccggcttttatgctacagcagcggatacctcatacaagctgtatgtagttaagaattttgagaatgagtattcttttaaaaataagacgctggtggctgaggggtcactaaaaaatgcaggctattacactgttgattttgatgagcctgttgatttggagtccggtgagcgttatgccattgtactttatataaatacaccgggatcgactcatccgatggctatagagtacaactcgggtgaagcatacatgtctacggtcaatctggatgatggcgagggctacatcagctatgatggtgtggcatatatcaatgtaaaggaaaaacaggattgtaacctctgtataaaggccttttctgataacagatgatatgtatagaaatattctaaagataataacagtatttttcgttatgcttgcacttatcgtgccggtcacgcttgaaaagcttccggctataaatgagaagtatgatatggcaaaagcactggaggataatgtgctgcaaaactatgtcaaggcttccacagatgcaaagcaggagaagaaccctgatgagatattgcaggagaaagccggctttgaggatgatttaaggatagagctgccggacgactcagaaggggagcgccaaagtatatcggtggaaaacgatgccctgacgcagacggtctatgtaaagcttaaggctgatgtggacaattactttacgaagtattccatgacaggcaggtcaaatcatatagattccatgcagtattaccgcaatggggcagatggtgtgatagctatcactacagacaagctctatcaggtgaagcagcgcatagagaatggatatctttatcttagctttgtcaatctgcatgatatatacgataaggtcatcataatagatgcaggtcacggcggccgtatgaccggtgccgtgcgaaacggaatagaggaaaaaagcatcaatctggacatagtgctggcacttaaggaacagcttgacagctattcaggtgacaaaaggcttgggatattctacaccaggacaacagataccaatcctacactgcagcagagagcggcacttgccaataaggcggatgcggatttatttataagcgtgcattgcaactcatatgaaaagggcaatttcaccgcggtttcgggtacgcaggtgctctacagccagtcagataacagagagctcggaagtaaacaccttgcacagatttgtatggataacgtgacagctgcgacaggaaacagggcatttgggctgcttcctgcagatgacatatatataataagaacaagtgaggctccggttgcacttgtggaggtgggcttcatgaccaacagacaggagcttgacaatctggccaatgcagactatcagaaacaggcagctcagggtatatacaatgcaatcatgcaggcatttgatgagggctactagctgtatcgggagattgtccgaatagaaaaagaaggaaggaaatatattatgacaaaaatcatatttgcaacaggaaataaggataagctcagagaaatcaaagagatactttcagactgtgacgtggatatacgttcaatgaaggaagcaggtatcaatgtggatatagtggaggatgggaagacctttgaagataatgcgctgattaaggcacgcgcaattgcggcacacacagatgcaattgttctcgcagacgactcaggacttgagattgactatctgaataaggaaccgggagtatattcagcgcgctatatgggtgaggatacttcctatgatataaagaataataaccttatagaacgccttgacggtgtgccaaaggagaagcgtacagcccgctttgtgtgcgctatcgctgcagtgctgccggatggaaaggaacttgtgaccagacagactatggagggctacataggatgggagatagcgggagccaacggctttggttatgatcctatcttctatttagatgagtacggctgctcttctgcagagcttactccccagcagaagaatgccataagccatcgaggcaaggctcttcgcgccatgagagagatgcttgtgaaggtgatctagagtataggagttgaattgcaacgtatacggataaaatgcctgccgggaagctcttttaagctgtccggcagccactttaaaaaaaatataaaaaaaataaaaaaagttgttgacatattctgccctttgctatatactaattcttgcgtcacggaaagaacgcaaacaaatccttcggggtgtggctcagcttggctagagcgcctggtttgggaccaggaggtcgcaggttcgaatcctgtcaccccgactacatgcgggtgtagttcaatggtagaacaccagccttccaagctggatacgtgggttcgattcccatcacccgcttagatattgcagtattcgcagtatcccatatgtgtctgtagctcagttggatagagcaccggccttctaagccgggtgtcgggggttcgaatcccttcaggcacattttttatttcatatcaattccatatggaccatatgaagtaaatatggtgggtatagcgcagttggttagcgcgccagattgtggctctggaggcccagggttcgaatccctgtatccaccctttgcattagtgcaaatagtgtcgtgcgcattatatgcgtatccgtgcggcgcacgagtattactcaagggctatcgccaagcggtaaggcacaggattttgattcctgcattcgttggttcgaatccaactagccctgttacaatctgaatatatgggatattagctcaggtggtagagcacttgacttttaatcaagttgtccggggttcgaatccccgatgtctcattgaaaagtgtctctcttggagaggcactttttaatgttagacatcgtaggaatcgaactccggacaacggagttgaccggggcgtagaacgataaaaatatgtgggtattatatgcatttggatccgcattttttgcgggtataacatcaatactggcaaagtgtggtatcaaaaaaactgattcaaacgtagcaactgcaatcaggacaattgtagttttgattttttcatggattatggtatttgtggttaaagcgcaggggcagatcacagctgtgtcagcaaagacatggatatttctgatgctttcaggagtcgctaccggagcctcatggctttgttattttaaagcactccagcttggcgatgtaaacagagtggtgccgattgataaatcaagcacaatactgaccattatgcttgcatttatcttttttaaagaggagataaacgtactcaggctggtatgtgtggtgcttatagcaattggaacgtatatgatgatcaccaaaaaggagatatcgcaggaagagcagaataaggccaggggttctcatggatggctgttttatgcagtgctgtctgctgtttttgccagcttcacctcaatactgggaaaggtcggcatagagggaatcaattctaatctgggaactgcaataaggacgatagtggtgcttatcatggcttggatagtggtatttgccacaggaaaacagcacaccataaagcatatagagaaaaaagagcttggctttatctgcctttcgggacttgcaacaggcggctcatggctttgctattacaaggcactgcaggacggacttgcgagtgttgtagtgcctatagataagctgagcatagttgtgtcaatcgtgttttcatatttcgtatttaaggaaaagctgactcctaaatcctttacaggactggtgctcatcatagcaggaacattgattatgctggtttaaatatataaaaacatcttgacgtttttctatttttttattattattgttaaccgagggaatatttatagttgacaatcatagcggatgatatgtattataatgatacttattaaatgagagaagaaatacaggacacgaaggagattaaaatggatccaataacactggcacaggagataatagacggaagaagaatcacaagggatgatgacctatcatttttccttacatgtgatttagacgagctgtgtaagggcgcagatatgatcagggagaagtttatcggcgacaaggtagatttgtgctcgataataaacggaagaagcggaaaatgccctgaggactgcaaatactgtgcgcagtcagcacataatcatacaaactgtgaggtttatgattttttacctgaggaaaagatacttgaggcctgcaggatgaatgagagagagggtgtagaccgtttctcgatagttacagcgggaaaagcactgacaggtgaggagtttgacaaggcaatacatgcatatgagacaatgaacagagagtgcaagattgatttatgtgcatcaatgggctttctttcagcagagcagcttcacagactgcacgaggcaggtgtcagcagctatcaccacaatatagagacctcaaagcgtaatttccccaatatatgcaccacacacacctatgatatgaagattgagacgcttaaaaaggtgaaggcagagggcatgtatgcgtgctcaggcggcatcatcggaatgggtgagacctgggaggacaggctggatatggcagtaagccttgcagaggtaggagtggattcaattccgcttaatgcgcttatgccgattgcaggcactccgcttgagggtcttgagcatatcagtgagcctgatatactgcggacagtatcatttttcagatatataaatccagaggctgacatacgtcttggagccggaagggcgctgcttacaaatgatggggagcttgcattcaagtctggagcatcagctacaattacaggaaacatgcttacgacagtagcctgtgccacaatcaggagtgacaaggaaatgcttgagggcatgggcaggaatgtgacacctgagtacatgaaataaatgtaattatttagaatataaaatatgtcaaagatgcgtaaaatagtattagttttgcgcatcttttttagtacaaacgacagggttggttgcgaggtgaaaaaaattattatataatgaaaaaaatgtaatttaagggatttatccggtatagcatggaacatgaataggagcgaattaatatatttcattgaaaaataagaggttacgggggaaatatgtacaacgataaaggcaatacaaagtatctgaagctgttaaagcaaaattattcatcaagtcaggatgtaatcagggagatagtcaatctttctgcgattataaacctgccaaagggcacggagtttttcctgagtgatatacatggcgagtatgaggcttttttacatatcatgaacaactgctcaggtgtgataaaggaaaaggtggatttgattttcaaggatacgatttctgattatgacagacaggagctttgcacgctcatatactatccaagagagaaaatggccctgcttgatgaacagggcaagatagacagtgactggtacgctatgacgttaaatcagcttatacttgtcgcaaagctgctctcatcaaagtacaccaggtcgaaggtcagaaaggctctgcctgaggaatatgcgtacattatcgatgagcttttgcatgcgcaggaggatgaggatgcaaaccaggtcagatatcacaagcagatattaaagactataattgatttagaggatgcggatgagtttataatcgctttgtctgcactgattaagaggcttgctgttgaccatctgcacattgtgggagatgtatttgacagaggaggaagcgcggataagattctcgatctgctttatgattatcactcgcttgatatcgagtggggaaatcacgacattctctggatgggtgcggcatgtggaaatgatgcatgtatatgtaatgtcatccgcaacaatctgaaatacaacaatgtggaaattcttgagaatgcctacggaataagcttacgacagctaatgctgtttggcatgaaaacatatggtatagaggatggaattgaggctgcaagggcggccatcacagtaatgctttttaagcttgaggggcagcttatacttgcacatcccgagtatgagatgggaaacaggctgatgcttgacaggctggacgagctgcaggatgtaggagtggacagaaagcgctttccaaccgttgatgatgagagaccctacgcactaagtgacgaggagactgtcatcatgagaaagctgcacaggcagtttgtgacaggacagcgcctgcacaagcatgtcagatttttgtatgataagggcggcatgtacaatgtatacaatggcaacctgctctatcatggctgtgttccggttgatagcaacggagcctttgacaagctgtatattgatggtgaattttatcacggaagggcgctgcttgacaaatgtgatgagaaggcaagggctgcgtatgtggacaatccttataaggatgatgtggactttatgtggtttttgtggggaggagaaaaatcaccgttgtgtggcagattgcttaagacctttgagatggaatatgttacagacaagagcatgtgggaagagccttctaacccatactacagcaggtattacgataagagcttctgctgtcagatactgcacgagttcgggctgtatgatgatgatgcgcatatcataaatggacatacaccggttcatgcaatagagggagagaaccctgtcagggccaatggcaagctgtttgtgatagatggaggcttctgtcgtgcgatgaacaagaaaaccggtatcgccggatatacactgatttacaattcacatggtctaaggctcaaggcacacacgccttttacatcggtggaggatgccctgataaataatactgacatagagacgtcatcagaggtcgaggaaaatgataagagacgtatgcttgtgaaggataccgatataggaaagaggcttattggagagattgatgatctgcacaagcttcttgagaactacaggaggctgtagggtaacatatttgactgtagggtgcgtatgggacaagaccttgacaaataagttataaagagttataaaaagattacaaagttataaagagttataaaaattattaaaagttataaagagttataaaacaggagcgcagagatgaaaaaaaatcccttttcattatcatttggcaaggaaccggtcagtttaattaaccgtaatgttcagtcttatgaaataattgatacatttgaggatgaaaaccctgcttaccaggtttgtatgattacaggagtcagaggctcagggaagactgtaatgctcacagaaatcaataaaacttttagggcagaggaagactggattgttatagatctgagccctgaacgtgatttattacaatcatttgctgcaaatctgagcaattatccaagtttgtcagaggtttttcgtgaagctaaaataaatctgtcattcttagggctgggcgttgaaatagaaggtgtttctccgattaccgatttaaatgtggcagtgacgaggatgcttgaaaagattaaaaaaaagcataagagagttcttgtgacaatagacgaggctgtatgtaatgatacaatgaaagagtttgtcagcctgtttcagatatatatgagacaggatcttccggtatttttgcttatgacaggtctttatgagaatatttatgagcttcagaatgaaaaaacgctcacatttttgtacagggcacctaaaattgagcttcgtccgttgaatataggcatgatagctgaaaaatacaagtctatttttgaattgacggatgaggaggctacagagatggctaaagagacgaggggatatccgtttgcctttcaggtactggggtatctttgttttaagcataataccggatggcataatgtattacctgaattcagtcagtatctggaggaatatgtatatgaaaagatatggagtgagctgtcaaaaggtgataaggaattgttggttgctatggcaaaaaccaatgacaccaaagtggaagcaatacgaaagactataaaaaaggcatcaaacagtttcagtgtatacaggaacaggcttataaaaaaaggcttgattatttcaccggagtatggacatttggagtttacactcccaaggttcaaagaatttgtgttgtgtagataattattgcactgtcgggatgcttgaggcagcggggatagagtctaataaggtcagggttgatgtgcaggatggaaggcttgtgatatcgcggatttaagacatattaaacgtttagtgttatagagacacaaaatatatcattttcggtattaacagagataaaaccactatttctatttacacattctttgacattttcaagtccatatccgtggatatctccggctttttttacggaaacatgtggaataggattggatatttcataaagcagcacatgatttttctggcgcagcgtacatgagatggagggtttgtgacctgccggaaaagcatcgcaggcttctattgcgttatccatagtgtttccaatgattatgtacaggtcaacaggcgaaatgttgaggtcagtatccagccatagattaaagtttatggtgattcccagactgcctgctttattagagccatagtttaggatgccgtcaacaatggaattaccggtatcaatcatttggtcaaggcttgaaaattttttctttaaggcagagagctggctttcggcttcaggtcgtgttttcgtagaaaccagattttccattgccagcatgtatttttttatatcatgccaaagtgcgcgggattcgtcctgacgagcaatgatatcctgatagtaaagctcctgtttggcaagctgctcctgcatacagagctgatttttctgtaattcataagatttctttactatttccgtatatccacaaaccactatattgataacaagcatacatatggtggtcatcacaaaggtggagtatttaccattgtcaataaaggtagtgtactgggcaaacagaataaatatgcttgacagattgcagagcatgagtggtatggcatgcagtagagcctttgaatcaaatcgggcattggtaaataaaataattatgaccagcaaaaacagatgaataatcttgcttgtggtattgtagataagccgtccttcacttattcctaaaagttcattcattgaaattccaagtctggaaagtacaaacgcaccaataacatcggaaaacatcgacgtaacaaaaaataatataatagtataggtgatttggaatactttgcatttgaagtagaaagtatagcataaaaacaaaaataagctgataatgacaagccgtataaacataggtgtatatagggttgatagcattatgaccgcaaagagtgatatgcaaaataggataatatatctgcgggaagggtatacaggtctaacctctttatgaaagaagtagaaaataagcaggcattctataataatggtatatacttcaattggaaaattcatttgatggtacctcgtatcaaattgttaaagcgctcttggaaaatggtctgttttttccgcgaaagtggaattttgcagccgtcagtcatagtgacagcaagtggtgtaaagctgtccacataattcaaattgatgcaataacttctgtgaatctgtacaaatgaaggatatgaaaaaaatgaaatcatattttccattgaatcctttatctccaatgtggatgtatttgcaaaatgaaaaataatgtgccggttcagactctcaaaatatatgacatcgtttatataaatcattttctgagttgaaccacacattaccgctgccttttgcggaagaatctcgtcaagagcctccctgacaacactttgaaacattgtaatcgttatcggtttgcataaaaatcgaaaagcaattccatatcctcggactgcatactgcagtgcgtttgtcgtaaaaactattacgggacgaggagaatatcctgctaaaatagagccaatttcaaaaccatttggcttatccatttctatatcaagaaaaattaaatcataaaattgggatttaaaagcctcaagcaggacagaggcagacaagaaagtagaaatattgtatggtaatttgcatgatttgcagtaatggtaaagtatatcaatatcttgttgttcatcatcacaaatagcaatattcataaaaataatccccttatcaaaacaattaagctatgaagattataaattataaattttgaatttacaagattaatttaggttgtgttttgagaatttaatggccgatgtaggaattatgcttaattatggataaaaagtatgcgtgaaatatcatttatgtgcgaatttatgtcatttatgcagatttgattgcaaatgaattatagattgtatattatttattatagagtaagtttagaaaaggaatacaggatgatgtacagaattggaatatgtgatgatgaagaagcatgtagaataaaaatatcggaaagtataagaaatatagctttaaaaaatgatatagaagttaaaattatccagtatgagtcaggaattcaggttatggattgtgagaaacctgatatattgatactagacatagagatggaacacatagatggtctgaaagtccgtgatttgttggaacagacggacaatgaggtactgattattttctgtactagccatgatgaaataatgagtaaagcatatgggcgaaatgttacagattttattaagaaacctgtgagggaagaagaaattgaaaagaaattgcttcatgcgataaatattattaatagaagggtaaaatggatttgtctaaatactataagtggactgacaaagtttaaaatttcagatatagtgtatggtattgcacagggaaggtacttaaagatatacatgttagatgggagcgaatattttattacagataaaggtgtatcacagctttatgaaatgttgaaggatatgaattttgccagaataagcaggagcgttataattaattttgaaaatgttaatacaattggagatgagataattatgacagatggggtgaagctaaagagtagtagaagaatgaaaaaacaaatacaagaagatttttttaattatatgtgtaaagtggcaagggttgaaagcgcagatagatgattttagaattaatattatttgaatggctgatatgtaagctggagattggtgatatcaagttaaaaaaatattttgcgtttatgctcataatgttaatgcagttaggtgaaattattgttatctttattcgaccgacacaaagcatatggtataccatattagcgcttccgagtgctttaattgctacagggatactattcaaagaaacgatgtggcgtaaattagcagtgtttttgtttgcatatggatatatcgatgtaatagaatatccgattaaaattatagttggcagcaataatgagttagtggtatacataattactattattataatttgtcttattggcaaaataataaatcaattcaaaaaagtgtcgtccatgatagcgcgtattgatcctatatattttatggcttcgtccatgatagaaataatcaatatgggaataattgtaatgaccgatgatataattttacctggtcaggatagacttaaaattgtaataaatgtattaacaatgatttcatttgttatgttaggaatatttggaattgtttttatgtttttgggtgcatataagaagcaacttgagatagataataagataaaacaaaactatctgattattcaaaaagaacattatagtcaattgtattctcatatgcgagaaatacggaaaataaaacatgatatgaatgctcatataaatatattgtataatctgttagatacagaacaatatgatgaagctgttaagtatatatatgacatcaaaatgcattatgatataggtaaaaaattggaatcatattatgataatggaataattgatgcaattatctattactttaatcaaaaaaatccattaattaagtttatttgtatgggaaattttagtggcaggaatgaaatttctgatttaacaatttgtacaatactttcaaattgtatttcaaatgcagttgaagcatgtagtagattacagaaaaaaaagaaagaaattatgattaatatatcaaatgtgaaaaattatatggtcattatgatagagaaccctattgaatgggaagttgatatatctaagttggggagatatacatcaaaggatgatagattatcacatggatatggggtaagtaatataatagatgaagtcaggctgtgtgaaggaaattataacttttgcgcagatgatggaaagtttagtgtaagtattgcaataaaaaaataaataccattcgttacaaaaaagtaccgctcattcttaaggtgttgaaaacaagttagaataagtggtactgtttttatataaacaaaaaatattgattgaatgtcaaacatgcacgaatttgtgtcattcatgtatttatggttgaagatatatggattataggatataaagaagttaacaacagttgtagtcaggacagattgcaagcagagaggtaggtacacatgtatgaatatgagtaaggaagaaaaaatagttattgcgtcagctttaatatgtcaagttttagttatctttgcaataataattttggggaatatgtattttcctataccggattggattatgaagatttatgcaggcggaatgattactgtattcatagtaattattcgtcatcattcaatgaaaaaatagagattattttttaatgagaattaccggacaaaacaagtggaatatgaagataattatgagaaagaacattatacattttactatttggttaataggattattttgttatggaatattatacaattttgagcatcaaagggagatacgcagtatgagtattctatagcatagaattcattgcatatgtttttgaacttgtattagggatatatggtgtttatatggcaaaaaaggctatgtgcaattggatgtgtattttggtatttatagtggtgttgtttatttttttaataggcagttttaattgtgagaaaaaatattgattgaatgtcaaacatgcacgaattcgtgtcattcatgtatttatggttgaagatatatggattataggatataaagaaattaacaacagttgaagagtctggaacggttgcaaacaggagtgacaaattaagggggaatatgaagaataatttaaaagttttattcatacaattatgtgttttggcaataggctgctttatcggagaagcggttttcggcttacccaaatggcttggacttgtgatagcaggtcttatgttttatttggtattttttataatacagattaaaggtgctatgagtaatatcaaagatgaagtgtcaagtgatggtatagccggagcaagaatatgcggagtctttatttctgcgatactacttgcatttatattgggaatatatgtttatcaagcggctaatatagcgatgactatagccggtgtggtattgcttatattacagcggagaaaaataaaagggtttttctttgagaatcgctgggagaataatttttggttggtgtattttggtattgcatttattatttgtggtgttttttctgtatttgcgtgtctggatattgcaccatgcacggagctttgtggtgtttacagggctatcggtatcatagtgtggattttggtgattttatggacacttccgcctgatacatggttggccagatttgccacaaataactataagagatatgaagataattatgattaagaaagtaattgagtttattatagagtatttttagaaagttttgctttcaacattcggataagtgcattgatatcacttttgggagtgatttgtgaattccttcaaaaaatgctgatatgaatatatgtatgcatggttttgaaattatattattcctgattggagtagatacatttgtttttttcaaagaggcaatgtacgattacaaatcttggctatatcagtatattgttgcactttatttttaattagaacaaaagaaataataaacaaagaaacattgaatctggagaggaatttatagatggatagaatgaaattgttaaagctacagatagttataggaataattacttcgtgcataggaatagtaacgataatgtatggagtgaatttttacaatcatccgagcagagggaatattgtgacatgtattgcattgctgttctgctgtatgttatcaataataagctgcgtgttaattgtgattaagaattataaaaataataaataacagtctcatgttatttttatcttagaaataagtctgctaaatatgtttctaccattcattacaaaaaaagtaccgctcattcttaaggtgttgaaaacaatttagaataagtggtactgtttttatataatcgaatattattgattgaatgtcaaatatgtacggattcgtgtcattcatgtatttatggttgaagatatatggattataggatataaagaaattaacaacagttgaggaggatggtgataatgctaagaaatggtattaattgtataaaattttattggtttggtatattttgtagtgcaataatttgtattgttgtcagtacatttttagattacagagttttattttctaaaggggatttttacacctgtagagtatcgtttactatatttgtagtttcatttacagtatcagatattataatgctacaggttacagcattgagtagatttttatatttgagaatcaggtattcaataaagtgcccattatgcattttcccttttcttataaatagtgtagatgggaagctcgagatgaaaattgggaaaaaacctgaggttgtttattgtgattttattgatgatgaagagtataacagattttcatacgaagagatgattcgaattttaagagagggtataattgcaagaaagatcggaagatatatttttggtattagtgtaatgattttgtttttatgctttaaaccggcaggagcgctgatagtgattattttatttgcagagtttgaagcattggacatgatttatgagcggaaatttcatggagataatttcaagcttcgcaacattagaagagggaatggagctttgtatttgaataaagtttatgatgattgcagggtggaaaatttctatgatgatgatataaataaaaactatgttcttggcatggttaagaggagactggctaagaatatatatgataatgattatacagaaccggcatatgtaaacaatatattaaaaagtctttttatggaaccggaggaaatcagtacttcgccggatataaaggaacttgatattgttacactgtatgtattttatgctatatttagcaagaatgaggattacgtaggcaatatccgtaatgttgtactgggaatgaaattatatgtaggacaatattcaaaattgtggagagattattttgattatttccttcaagtaattgattcatatcaatggaaaaaagaattggaaattaataaaaagaaagatatgattctgctatatgactgttgggcaaatattccgggcaagtataggaataccttattgtatgtgaaaaataaaattgatgattatattaatcaaatatgaggcacctaagaaaatagaacaagggcgtggataaatgaaaaaaataatttctaatttgtcagtaatgatttttgtcataggatgcgtgataatggaaataacaacatggtttattgattcatatgttatgttttatataggaataattattgttatagtgggaactattggaatgattattcaaggaaagtttaagaaagtaattgagtttattatagagtatttttagaaagttttgctttcaacattctgataagtgcattgatatcactttttggagtgatttgtgaatttcttcaaaaaatgctgatatattagaaaatggtgaattaggagggagaaattatcggatgaagaataaaataataatatatgtgatagtacaatttttactaattttatgttcaatatttgttattccaaatgttgagggtgtattgagtattttcatagtgctgattgttattgttggaaatgttttaaatttaatttttttattaaaagcaaaaaacgcaaagagagtttttgagcattattagcgtttgaaccaagtggtaattttaccatttgatagtttatataaaaagttaagaaaaggagaaaatgaaaatgaaaaataaccttgaacttattttattagtaggtaactgggtagttgttgcaatacaggcatttactatatttttatatggaaatagtataggtttatttattattatgttgcttgcattaatagtacaagtacttggtgtttatgataatagaaagaaataattaatatattgacttacaaaatgtgtattaaaagaatagtaaacaggcgtggagctagtctctctacgcctgtttaaatgcgtgtcttatttacttaccacaaccttacaatccttcttaaagcaagcaattccatacttgatgaaattgcgcatgccatcctgcttcagcttatccacatatgattttttctcaatctggttcagtgcctcatcgcaggctgcatccatatcgccgttttcggcatatttaagctctatcacgatgccggttctgttgtttggaacttcaacgaggatatcgctgtagcctgtgcccgattcggtgtttgatttgatgagccagcttgccttgtagcccagcagaccaagcaggataccatggtagaaattttcttttttatctttggcaactgcggtatcccttatacttattgtattccagagataatcgccaaaaagctcttctattttttcggtatccttatccacaaatgcattgcagaattgttcaagtgtctttccgtcatttgcggttgtatcgctgaaccattcgcggatttttttgatgaaaagatttttaatctcgcggtttggtattgataaacgtaccctgccatcgtcagtcacgccctgcttggtcaggtaaccggtggtgaagagtacactccacaggtttgcgatgcttttgtcgatttcatcgtaggtcagctcctgggatatttctttttcaatgtattcgcctgctatcagacgctcaatctcatccttggtctggacatcggccttgtcaatgaagcttctgaccagagcatttccgcttgaatttgaccagaagtcctgcggctttgcagtgggatctgcgcacaggctcttgcaatatcttatgacatcccacgggcagtagatatcggtgttgccgaaatgatagccgtcgtaccattcccttatatctgcataatgctctgaaagattaaaatacttaagtattttctgaacttctttatctgtaaagccaaagcactcgtcatacattgaatccatgattgaaacgacttcaaagttgtttaatcctgtaaatacgctttccttcgatatgcgaagacagcctgtcaaaatagcaaactgtaagtaatcgttggtctttagtgcctgtccgaacaagcctcgtatgagagagaccatctcatggtagtagccgttctggtatgccttgtcgagtggcacatcgtattcatctatcaggatgactaccttttggccgtaatgcttatataaaagctgggaaagaagctttaatgaagcggtaaatgtatccttgtcaaaaataaactttcccttttctatatgaagtaatcctttgaactgttctttttccaaaactgtcaatttatcactttctgccaaaaaggagaatttgctgatttcatttcctataattctggagaatacctgaaatgcctcatcatatgataaaccctcgacatccttaagtgaaataaatatcacaggatatttgcccatatgctcatcacaaagagatttattttgtgaaatatataatccgtcaaacagtgatttgtccatgccaatctcgaaaaatgagcgcagcatgctcatgccaagagtctttccaaagcgccttggacgggtgaacagcgttactttactccaattgtttaaagtctgctcgataagcatagttttgtctatataataaaatccagaccttcgtatatcttcaaaattttcgattccaacaggcagttttaatatttccatgtgagcctccccagttaaaatatgttcgatacattcacatatagtataactgatttttagaggaattacaatttctattgactatttaaaactgaccataaaatgaaagtaatgttgcctaatacttgaacaatatcatggggttgtctataatgtagtaaaaagaaaatggagttttaataaatgaaacgatttaccgcaatattacttacaggcatgatgatatttacccttgcatcatgcggcaaaaaagcacaggatacaccgacaaagcctgaaacagagacacaggctgtagagaaggtcgagatgcctacggaaacggaagccgtgacagaggtggtaacagagtctgtaaaagacacgcagcagacagaagcgcagcaggaagaacagactgccgaacagccggacgaggagcagaacaattcaggtgataataattcctcttatcagtatgtagaaagagcatcctatgagaatggagaatcagtatcactaaatccttcatggcagtatgcagaccattcagcgataaattcaggctgtgcggtcatgtacaaggctacagcaaaccgcaaaaacatagtagtaggtgtcaatgctggacacggtacaagcggaggaacttcggtgaagacactttgtcatcctgacggctctgcaaagaccacaggtggtacaacaggcgcaggcgcaacaaaagcagtagcagtttcaggtggtatgtcctttaatgacggtacaccggagagctctgtcacactccgtatggcgcagatattaaaggacaagctgcttgcggcaggctatgatgtgcttatggtaagagacggaagcgatgtacagcttgacaatgtggcacgtactgtcatctgcaataatgcggcagactgtcatatcgctctgcactgggatggcgacggactaagctacgataagggctgcttttacatatcagtgccgggaggtataaagggtatggagccggttgcatcgcactggcagcagcatgatgcacttggggcaagcctgatagaaggactgcgcgcccatggagcaaagataaacggtaatggctcaatggcgatagacctgacacagacctcatacagcacggtaccgtcagtggatgtagagcttggcaacgcatgctctgaccacagcgatgccacacttgaaaatctggcagacggactggtgcagggagtcgagggatatttctagaatataaaaagtgttatatagaagtggtacaacagatagagaaagggaatattatgacagacaacaaatccggggagatactcataatagaggatgacaaggacattaatgatctgcttgcgacagcgctctcaaaagccggatataggacaagacaggcatggtcaggcacagagggagagcttttgcttaagctggaaagggaagcttatgcgcttgtgctattggatctgatgcttccggggctttcaggggaggagcttctggcacggatacggcagatggatgcgtcacttccggtgataatccttacggcaaaggatgagctggatgagaaaatcaatctgctcgtggcaggcgctgatgattacatcacaaagccgtttgagataaaggaggtcgtcgccagagtggctgtgcagctgcgtcatgcggtggcagatgtgccttcaaagtcgggcaaggcaggggaaaaccagacaaaagcagaaaatgatacaggacagggagatactgcaaatacatacatagcgggacccgttaaaatagagcacagacagcttgtgctcgatcggatttcaagacagctttatgtagctgataatgctgttgacggcatcacaaagcaggagtttgccatactcgagcttctcatggcgcatcccagacaggtgtttgccaaggaggacatatttgaatatgcctgggatgagccgtatattggcgagacaaagactcttgatgtgcacatcagcaatatcagaaagaagataaaaaagctgaccgatgacgagtacatagagacagtgtggggcatcggttacaaaatgaaagagtaaaggtaaacaagctttactctttttttactttttgttagcgatgtattaggattttacatttatattatgattaaagggttgctaaggaataaaagaaaaggagatttgattgtgagtgaaatattattgcagacaaaggcactgaccaagcagtatggacatcagaaagcggttgacaatgtggatatccacatcaaaaagggtgcaatctatggatttatcggcagaaacggtgccggcaagactacctgtatgagaatgatcggtggtctggcaaagccgacaagcggagagatatccatgtttggatactctggaaaggatttgtcaaaggtacgctcaagagtgggctgcctgattgaggcaccgggtgtatatccaaacatgacggcgaaggaaaatatcgagatgaagtgccgtctcttcggcatcagtaaaaagggctatgcagagggcatacttgataaggtaggtttgttaaatgtgggaaagaaaaaaacaaagaatttctcacttggtatgaagcagaggcttggaatcggcatggcgctggttggagagcctgaccttttagtgcttgatgagcctatcaacggacttgatccacagggaattgcagaggtgcgtgatacgattcagaatctgtgtgcacagcaggatatgactgtgtttatttcaagccatatattggaggagctttcaaagcttgccacagattacggcattataaataatggagccctgcttcaggaaattaccagagaggagctgctttccaagtgcagtgagaagattacactgacagtggacaatccaaataaagcagtgcctgtgctcgataagatgggctttgtgcactacatgatagtggacaaaaatcatatagatgtctatgagcgcctgaatgatagcgccgccttaaatacagcgctggtcacagcaggagtttcggtggcacagctagcggtcacaggaatggagcttgagacatatttccttagtatcacaggaggtgcgacaaatgtttaatgcggtaagaatggatatttacagactgatacatacaaagtcagcttatgttatacttgtaatagctatggcactcgcaatagctatgagcggtatgacagctcttgtcagaagcatggcgacagagagcatcgtggaaacaactgatgatgtcactatggtaagtgagtcagacagtgagatagcagatgaatacgatacagcatcagcggaatcgtcaaatggaccaacggcaacagtcgggcttgaaatggatgaatccgacatgtcagatgaggtaccgaccatagcagatatggttgaaagcgatatagcgggtcttgacctggcacttttacttgcaatatttacggtgctcttttcaacagcagacctaaacagcggctatataaagagcgtaggcggacaggtgaagtgccgtggagtgctgctgttttcaaagatgatagcgctttcggtatttacctttgtggctatggcacttgatgtgattgtccagtgtattgcgacaccgctgtttttacatggagcagaattcggagatgcagcagacttatttaagatgcttggcagccagtatgtggtcacacttttatttgtatattttgtcatggcaatggcaatcattataaaaaacaatgtaatcagcatgattatcgctgtgtgcatgtgtacaggtatctttacactcattttcagtggaatcaatatacttattgaaaaaatcggagtaaagaactttgatataaatgattaccttattgttaatcagatttctgagcttgatctgagtgcgtctgcaaagaccgtaggcggtgcatttgcggtagccgctgtgtgggcagtggtgtcactgattgcagtgtacggtgtatttaaacgcagggatatataatgtgttttgaatgaggaataaaacatggtttggaaaatactgactgtaatacttgcagtttcggtagctgtcttaatagctgtgctcgtaaaaataagggcacagcttcgtgacattaacgaacagcttgattttttatgcgaaaaggatacaaatatgctccttttaaccgataccaacatggctgatatcggaaggcttaaggagcgtataaacagatttttagagcaatggcacaggcagcgtgaggcagcagcgaaaaaggagcagatgatatctgacacgtacacaaacctgtcgcacgatatccgcactccgcttacctcgctggacggctattttcagctgcttagggatgagactgacaagagcgcgcaggagcattatatagatatcatccaggagcgcatcacaagccttaaggatatgctcgaggagcttttcatgttcacaaagcttaaaaatgacagcttcaagctagagctgtctaattgctgtgtcagcagacttttaaagcagacagtgttttcttattatgaggagtggaaaaagcagggcattgagccgtcacttgatatatgtgaggatacgatatttatcactgcaaatgtgcaggcgctcaggcgggtgtttcagaatgtaataaaaaatgcgttggtgcatgggcagaagagcatctgcatacagatgaggcaacaggattcgtgcaattgcagggcttcagattacgagcgtacttcaaaaaataggattgtccatattttggtttcaaatgatgtaaaaaatcctgatgatatagacgtggacaaggtgtttgagcgcttttacaaggctgatgaagcgaggagcatatcatcgagcgggcttgggctttcgattgcaaaggagcttgtggagagaatgggcggaagtattgaagcaaggcttgaggggaagcggtttgttgtggaaatactgtttgaatgtgaatagttcacttttgtaatgtgataaataatattgacacacatgaaacaaaatgatatactgtcaaagtgtttgcgggcatggcggaattggcagacgcgctagatttaggttctagtgggagaccgtgcaggttcaagtcctgttgcccgtactatttacaagggtttcagaggtttttattacttctgaaattcttatttttttatcatttttcctatacgaaaggataccacaatgcaggcttacaaggatttagtaaaagcacttcccggcttaaaagaggatatgccacgcgcattttacatgctcgcagaactctttgattacggttcatttgatatatgcagaagtggcgacaaatatataatcccatatatcatgaatgacgcggtggaatgctatctgactgtggaaaatgcagtgttaaagggcgattatcatagcgaggaagaaattatttcggcatcgttggttttaggaagtgaaaaaggttatggactcattcttcaccagcaggacaatgtgatcacactctggtttgataatttgcatgtgcatgaggcatgctttaaataccatgaaataggacatttctgggtaaagggacaggagcagtggcgcatgcttgtatatatggtaggaaccatcgcggacaagtatatgtacatgggaaaggaatactgcaacgagacagaatgttttatccagagccttatttactttgcaccgtttcgcagatggacaccggtacctgacgatttgatggagtatcattttccagcccgtgtagagggaatagacattatggaggagctttgcagggaggtttcggacactgattatcttaagctcattgcacgctacagggcaaatccatgtgagaaaacggaaaagtttttgagcagacatttagccgatgcaaaaagagtaccgctttatcagtatatttataagcttgtgataaaggcatcaaaggattatcccgagagaaattacggaaatcagataaatgaatgcataaaagaaaagcgtaaagcgcttgaacaggagctgcttcaaaagggatacaccggaaaataccctgtgttttcaaagaaaaatacgactgtgcgtgtaatggaggaacagccctacgtcacagcaattctcgagtgggatgattacaaatacaagcagcagcttatgatttctgagtgcagttcaaaaaagtatgatggaattaatgctggattttttaaaggaataggcagacacggacacattgtgcaggtgtagatacacataaaacaaaagccacggagcaatccgtggctttcataatacgcttattacaaggatgggcttgagaagactcgaacttccgacctcacgcttatcaggcgtgcgctctaaccggctgagctacaagcccttgtgttttgcacaaaacgtatactacaatatttttggtgagaagtcaagagttttttagaggttttctccatctgttttatttttcggatattcgtttgagtgcgcactgatgacctcattaatccagtctacacactgttttttaccgtcatctgtaaatggaaaggtattgtccgtttttttgctgtcgtcagtcaggtcaaaaatatacggccccggccatatccatgcatgaaagattggctcacccttttcctcgggagtatcctcggtggcttccttgatgacaggctcctcacgctttatgagaaagcgcatgccgttcatccagccggtaaaggttgtttttttatagtagttgagattgagtgcatcgtcgtatgtaagcataggtggctccttgatatataatgataagtaattatacaccaaatacccatttaatgccagaataacgccggtacttaacaattcaaagtaatcatgcactgaaaattaatatattaatgcaaaaataaaaatgaataaaaatgtataaataacgcttatagactgcataaactgcccttattaatgagtattataaaaatatgactaatttttatgcaaaaataaaaataatataggaaaatatatccaattgacaaagtatgatttctgtgtataataaaaaagaattgttcgcgtcagaacgacagttgtatcagacagcaagattagggagtgtgtaatgacaatgacgtcattcgcacttttttgcgtattagacaaaatactttgacgtggtacagtgataatgctttaaaaaataaaaataatgcattatcgatacaaatccaagagggagagaaaaatatgggtaagtacattgtaaagagagttattctcgctatttttacaatcttcattatcagtcttattacattctttgccatgaatgcaattccgggtggtccattcaattcggagaaggcaaagagtccggcggtaatgaaagagcttgaggcacgctacggactggatcagccacttatagtccagtacaagaattacatggcaggcgtgctgcacggagatttcggtgttagtcttaagacagaccgtccgatctcagatatcatcggggagagcttcccgatttcagcgaagcttggactcttagcggcgctcactgcgatagtattcggagtggtgctcggttcgatagcagcgctgatgcgaaacaggtggccggatcgagttatagtattcttcgtcacactgattacgtcgatgccgtcatttgtcatcgctacgttattactttatttcttctgtataaagcttggcgtggtgcaggctttcagctcaggaagcaacatgatattacttccggtgctgtcactgtcactttcaccgatggcatatattacaagacttacaaagacttcaatgcttgatgcactcggacaggattacatccgtacggcaaaggccaagggtgtacatcagtacaagattatatttgtacatgcgcttcgtaatgcgctcattccggtcatcacatatgtgggacctatgattggtggtatcctcacaggttcaatggttattgagagtattttcaatatcggaggactcggttccaagttcgtaagctgtatcacaaaccgtgattacacaatgattatggccacaacacttttccttgctgtcatcatggtaggcgcgaacctcattacagatattgtatacaaagtgattgatccacgtattaagcttgattaaggagagataaagatgaaagataatatgaagagagctcctttctccacacagattgaccttagcaagttcgatatgaaggattttgccaaggcatcagatgaagagaaacgccagcaggaggttatgggtgagtcaactaccttctttaaggatggtcttaagagactccgcaaaaatccactggctatgggttctattatagttttggttttacttattttggttattcttctggcaccaaagattgtgccttacggctatgcagatatcgttaagggtgcacagaacttaggacctttccagtacagcgatgctgagcaggcacagattgatgcaggtgagaagctgttcccgcacatttttggcacagatgagctcggaagagactattttatccgtgttgtttacggagctcgtgtttctctgggagtcggtgtgtttgcatcactgcttgtgcttataatcggtatcatttacggttccgtatcaggcttctgcggtggcaaggtagatatggttatgatgagaatagtagatatcatttattcattgccggatatgctgctcatcattttactcgcagttgtattaaatgaggtgctgacacctgtaataaagggtacagtgctttcaaagctcggtgtcaacatgattgcacttttcatagtgtttggattgctttactgggtaggaatggcaagacttataagaggtcagattcttaccattaagcagaatgagtacattctcgcagcaaagtgtatcggaacatcatcagcccgcactatcagaaaacacattttaccgaactgtctgtcagtaatcatcattactacagcgcttcagataccatcagccatctttactgagagttatctgtcatttatcggacttggtgtttcggctcctatgccttcacttggttcgttggcaaatacagcgcgtggtggactccagagttacccattgcgtcttatttttccggcgcttacgatttgtatcattgttcttacattgaatcttatcggcgacggcttaagagatgcatttgaccctaaattatcgaaatagtaaggagtgagtaagatggaagataataagtttgttcttgaagtatctgatctgcacactaccttcaagaccgataacggagacgtatcagctgtaaacggtgtcagctttaagcttgagccgggaaagactcttggaatcgtaggagagtcgggctcaggaaagtcagttacagcatattcaatcatgcagattcttgctgagaatggtgccatcacaggcggctcagtaaaatataagggtgaggatatcaccaaatggaacaaaaagaaaatggcagatttcagaggaaaatgctgctcaatcattttccaggatcctatgacatcgcttaatccggtatttacggtaggctaccagcttgaggaagcagtgcttcttcatacagatcgtacaaagaaggaagcaaaagagcgtgctatagagatgctcacacttgtaggagtaaatgagcctgagaagagagtaaatcagtatcctcatgagctttcaggtggtatgagacagcgtgtcatgatagctatggcattagcctgtgagccggatatccttatcgcagatgagccgacaacagctcttgatgtgactatccaggcacagattcttgagcttatgcagtcactgcaggaaaagctcggcatggcaatcatcatggttacacatgatctgggtgtcattgcttcaatgtgtgatgagatcatagttatgtacggcggccgtgtgtgtgagagaggaacagcagatgccatattctacagcccggcgcatgagtacacaaagggactgcttcgttcaatccctacaaagaccaattcaaaaaccaggcttgttcctatcgggggcacaccaatcaatatgctcaacatgccagagggctgtgcattctgccctcgctgtgatgccgctatgaagatatgtctcaccgaaaagccggaggaaatctgggttggagaggatcatctcgcatcatgctggatgaatattaagaatatgatggaggagggaaaatcaaatgagtaatgagacaaataacaacgagtacctgctcaaggtagaccatttgaagcagtatttccctgttcatgacggatttaaaaagatggaattaaaggcagtcgatgatgtgtcatttgccataaagccgggtgagacgcttggacttgttggcgagtcaggctgtggaaagacaaccgtaggacgtactcttttacgtctgtatcagcctacagcaggacgcattgagttcgacggcaatgtattgtttgacagtgagaagaagatagatgtggatatgcatccttaccgtaagcagatgcagatggtattccaggatccgtattcatcactcaaccctcgtatgacggttgaggatatcattggagagcctctcgatgtgcacaagctttacagtagcaagaaagagcgccatgagatgattatggatctcatggagacagttggattaaacgcagaccatgccacacgctatgcacatgagttttcgggtggacagagacagcgtatcggaatagcaagagcgcttgcagtagatccgaagtttatcgtatgtgatgagccggtatcggcacttgatgtttcaattcaggcccaggtagtcaacatgtttgaggatctgcagaaggagagagggttatcatacctgtttatagcgcacgatctgcttgtagtgcagcatatctctgatagaatagctgttatgtacttaggtcatatgatggagcttgcagatgcggatgagctgatggacaatccaatccatccgtacacacagtcgttgctttcagcggttccgatcccggatcctgagactgccagacacagcaagcgaatcgtgcttgagggagatgttccttcgcctcttcgcatgcctagcggctgtccattccgttcgcgttgtaaatatgcgacagaacagtgtgcagcagcacgtccggagcttacagacagaggaaacggacatatggttgcatgcttcaaccgctaatataaggtttttaccggcatatagcttaagccacatgtgccggttctaacataaatttatttttcatattaattaattaggaggaagaaagatgaaaaagagattagtagcacttactcttgttgcagctatggcacttggcatgactgcttgtggaagcaagagcaacaacaaaacaactactaacgataattctgatactgctgtatcaacagccgtagactggacaagctatgatgagttagtagaatctatccgtacagaagcagatcttgcaaagcgtgcagagatgatgcaccaggcagaggatatgcttatggatacatggtgtgttattccactttactactacaatgaccagtatatgctcaaggattatgtcacagacgtatactcaacagtagagggtatgaaatacttctacaatgcaaagaacacaaagaatgccggaaagttaaacatcttcatggcatcagagcctgatcatatcgatcctgcattaaacagtactgttgacggcggatgtcttgcagtaaacagctttgagggtcttatgcgttacaacgctgagggcaagcttgagcctgcatgtgcagagagctatgaggtttctgaggatggcctcacatacacattcacaatgcgtgacggtcttaagtggtcaaacggtgatgagcttactgcaaaggatttcgagtggtcttggaggagagctgcagatcctaagacagctgcagattacagctacctttgcgcagtattcgcaggatatgatgatacaaagggtcttgctgctgatgatgtagtagcttctgatgatggaaagactcttactgtcaagcttaaagcagttacaccatacttccttgacttatgtgcattcccattcttcttccctgtaaaccagaagtcagtagagggaaatgatgactgggcaaacgatgcaagcgacaagttcgttacaaacggtgcattcacactcaaggagtggaagcatgattcaagcatgacatatgttaagaatcctaactattgggatgctgacaatgtaacagttgatgagatgaacgtaatgcttacatctgatgatgtttcagcttatacagcttaccagaacggtgaccttgatttcatcgatacagttcctacagccgagattgaggcagctaagaagacaagcgagttctacacagttgacaaccttggaacatactacgtaggcttcaacattaactctaagctctactcagaacttggattagatgctgaccaggctaaggtattcagaaaagcaatctgtcttcttatcgatcgtcagtacattatcgatacaatcgcccagggcggacagaagattgccacaacatttatcccagagggcgttacagatggtaacggtggcgagttcaagaacaaagattactacggcacagattacgataagaactttgaggaggctaaagagcttcttgcttctatcggattattagatgagagcacaggtcaggtaaaccagactgtcgagttctcataccttgtaaacaactcagagtcaaatgtaaagattggtgaggctattcaggcagatctttcaaaggtaggtatcaacttaaaggttgagcagcaggagtggaacgtattccttaacagccgtaaggacggacagtttgatttcgcccgtgagggatggcttatggattacaacgatccaatcaacatgcttgagatgttcacaacaaaatcaggtaacaacgatatgcagttcggtcgttaatctgattttgctatcataacaaagccgctcgtgccatttgcacgacgatgcgaataacatgaagagtatataggaagtcatacagttattgtatggcttcctttttttgcgtttaaagtgggcttttcagagcgaaaaaaggctctttaaaaaaatatgataatggtgtaaaattattattgtatagttttagaatgatgtttgagggtgtgtgatgattttaggactaagtgatacggaaaagaaatttaagacagcgatggatacggcgggtgccgatatgacagtggtcaacagctggcttaagctgtatgtcaaaacaaaaaagaattcctccggtgttgcaaagcgctattatggcgtgaagacaggtttaagcagcctgctttcagatttaaaggagcttgagcaacaagttatcgggtattgtgagctcacaggaaccgaccggaagcactttggagagctgataaaggcttgcaaagcgaaaagcggcatgtttgacgatgaatttttaatcagcaaggtggacacggattttcacacgactctggactctgttgtaaagcagggggagagatatctgtcatcctttgacaacggtatcattttacagagtgagatagagaatctgatacacctgacaaatgaggggcttgaaaggaaaaagcctgatttgtttgctctgtcatatttctatctggggcacagcaacaaagagcttgcagagctaaatttcacacaaaagactaagagagtgcatgagatatattacgaggagttctggaaggatatattaaagcagcttgaggcatgtgtgaagcaggctgaggccataaacgataagtatgagggcacgacagaccggcgcacggcaaggatactgtcggagcttaatccgctgcttgtgggtgttacaaagcaatgggagccggaacagacagcagagtacatactgcgcgatatgtgcaggatattcagggattgacatagaaaatgcagattgataaaggagcagaatatggatgttataatttgggcaattatcttaggagctgttttttacattaacaaaaaatcaaagagcgcaggcagtaaaaacacgcagccaaacaaaccgagaccgcagcagaagcagatacggcagatatggaacagcatgcagaatacagttcagtcgggtatgaatgcattgaaccagacatatcagcagaaaccacagccacagatgcagcagagagcacagcagcctcagagaccacagatgcagcagagagtacagccacagcagagaccacagcagagcaatccggatatagtgcagagggccgtgaaaaataacgcacgctttgcggatgatacgacacaaaaagagattgagactatgcacggacatagcgaggcacagcagaggctggcgcaggagcactcaagaaattgccagacactgcataataaagcagctgatggtgcaaagattatagaggctgagacacagagcatgtttggcagtgttgaggatctgattgccatgggatacagtggcaatctggagtttgagagagatttccttggggaaggcttagacatgattaacaacttttaaataatatgaaaagaggcagaaatgatggacagaacaccaaagcccggagagctttacaggcactttaagaataagctgtatcagatagttacagtggcgacacattcagagacaggggaaaagcttgtgatttatcaggctttatatgatgattttgggatatacgccagaccactcgacatgtttgtaagcgaggtggaccatgagaaatatcctgatgtgaagcagaaatacagatttgagaagatcacacttaaggataagccggaggatatgtcgggaaagagtatctctttgagcactaatgcgattgcagctaatgcacctgaagctgtgagtgttcagacacaggcatgttatgagccggcaccggatgcagatgaaggccaggcaccggatccgcgtttgctggagttccttgatgcggatacctttgaagagaagtacaatatacttatttcaatgagggatatcataaccgaccgccttatagatgacatagcggtggttatggatgttgtagttcctgagggcccattgcaaaagcggtatgatgatttaaagaatacgataaagaccaggcagtactatgaattttccaatcggctcagatagctgttgtgatatttgccggattcagtgacatcctcgccaaaccagtcaggcgctgtgaattcatttgctgcgtcgacagagtcgaattcaacctccacgagtgtaagaggagccagatcaccctcaaatacatcaagctctgcggtcagaccaccgtcaagaggtatgagatagcgtgtcttttcgatgagacgaccgtcaatcttttggacaagatggtcgtaggcttcttttgtgagaggaagattgtactcctcgcgcaccataagaccggctcccttgtaggtcatataatagctgtcatttgagcgtctgactctgacaacaggcgaggtgcacagatagccctgggcgatttttttgctcgcgtagctgtctaaattggaaggaagctgtttaagtaagtattttctttcgatttccatggtatatcctttcaggttactggtagatttatagttacggtttatacttttgttttaccctcatatcatttatatatgattataatgaccggtatttaaaaattcaaggacgaaccgcagctttttatagtatgattaaagggtcaaaaggtatcatagtattatcaaagaaaaataaaggagaaaaatatgattaaagtaggaatttttatggcagacggctgtgaggagattgaaggacttacagtagtcgatatagttagaagagcaaagcttgagattgaaaccatatcaatcacggaaaaagccgaggtgacaagctctcatcaggtgacatttaagacagataccaaaaaggcacaggctgattttgacagctacgatgcaatcgtactgccgggaggcatgccgggtacattaaaccttggcgcggatgagaccgtagtaaagacaattaagagatttgccgctgagggaaaacttgttgcagcgatatgtgcagcgcctagcgtgctcggtgagaatcatatacttgagggcaaaaaagctacctgtcatccgggttttgaggaaaagctgctcggtgcacagtggcttgagcagcctgtagttgtggatggcaatgtgattacaagtcgtggaatgggaacagctattgcgtttgcactcgagcttgtcagatacttcacagacgatgccacagtagagcatattcgacagggactggtatactagaccggcaagcccctgtattataacaaaagaggtcacacaccaaccccatggtgcgcggcctctttttatgcttgcatttgaagcgtacatttgaagcctgctattgcagagcttatttcatctgctgctcctgcttcatgatcatctgcttgaccatctcgccaccgattgaaccggcctgcttagaagtaaggtcaccgttgtagccctcttttaaaggaactccaagctctgaagcaacctcttccttgaaacggctcatagcctcttttgcctccggtacagaagcctttttactacttgatgctgccataatgcaatacctccttttaaaacgttatacacaagctgtatgtgtatggaaatattatgccgtaaaatgacaaaaatatgttttggtattgctgacaatttatggaattatacacaaaagcaaatttaatgtaaaaaacactggaaatagtggatttgttgtgttataatcatccaatgactgggcttagcagtttaaaaagcatgcccacattacatttgatgtacataccattcatatatatttttaaggaggataacgattgacatgagtgtacaggttgagaatttagagcataatatggcgaagcttactattgaggtagcagctgaggaattagagaaagcattggattctgcatatcagaagcagaagaaacagattagtgtacctggattccgtaaaggaaaagtgccaagagctatgattgagaaaatgtatggagcaggtgtgttctacgaggatgcagcaaacattcttatgcagcagacatacgcaggtgcagttgacgagagcggtgttgacattgtttcacgcccaacagttgaggttactcagattgagaagggacagcctttcatctacacagcagaggttgctgtaagacctgaggttactcttggtaagtacatgggcgttacagttacaaagatcgacacatcagtttctgatgaagaggttgacgctgagcttgagaaccagagaaacaaaaatgcaagaacagttacagttacagatcgtcctgtagcagagggagatacagcagttatcgactttgagggatttgttgacggagtagctttcgagggtggaaagggtgagaatcatccattagagattggttcacacacattcatcgatacattcgaggatcagttagtaggaaagaacacaggcgatgaggttgaggtcaatgtaacattccctgagaagtatcaggcagcagaccttgcaggaaagccggctacattcaaggttaagatcaacgagatcaaggctaaggagcttcctgagcttgatgatgagtttgcacaggatgcagcaggtgttgatacattagctgagtacaaagaggaaatcaaaaagaacctcacagagaagaaagagacagaagctaagaagactaaagaggatgaggctatccagaagattatcgataagtcaaagatggatcttcctgaggcaatgattgagacacagtgtgagacaatggttgaggagttcgctcagagaatcgcacagagcggtcttacaatggagcagtacttacagttctcaggcatgacagttgaccagcttaaggatcaggttcgtcctgaggctacaacacgtatccagagcagccttgtacttgagcagattgccaaggaggaaaacatcgaggttactgatgcagatatcgatgctgaggtagagaagatggctaaggcatacggcatggaggctgataagcttaaagagtacatgggagatgctgagaaggagtctatgaagaaagacattgctatcacaaaggccgtagatcttatcatggacaacgttaaagagcgtgcaaaggcaaagaaaaaggctgatgcagaagagtctacagaagaataagatttttgaatcaagatttgattgactggctcagaagcctattttctgagccggtcttttgagcttttataaaggaggtattttatatgagtttagtaccatatgtcattgaacagaccagcagaggagagcgcaactacgacatttactccagattattaaaagatcgtatcattttccttggagaggaagtaaatgagacaacagccagccttgttgttgcccagcttttattccttgagtccgaggatccgaataaggatatccacctttacatcaattcaccgggtggaatggttacagcaggacttgctatttacgatactatgcagtacatcaagtgtgatgtttcaacaatctgtatcggtcttgcagcaagcatgggagctttccttcttgcaggcggtgcaaagggcaagagatatgctcttccaaatgcagagattatgattcatcagccatctggcggtgcaaagggtcaggctactgagattcagattgctgcagaaaatattttaaagacaaagaagagattaaacgaaattttagcagccaatacaggcaagccatacgagacaattgcagctgatacagagcgagacaactatatgtcagcacaggaagccgcagagtatggtctcatagacagtgtaataacaaacagataatcagaagttagatgaatttaagagggtaccccatatgggatgccctcatgcaataaaaggagttaataatggcaggaaaaaacgacggaaagattcgctgctcattttgcggtaagacacaggaccaggtaaatcgtttgatttccggacctaatggagcttttatctgcgatgagtgtatagatatatgtgccgagattcttgaggaagaaggcgtagatggccatgaggacaaaagcagcgctaaggatgatataaatcttgttactccggaggagcttaaggcgtttctggacgattatgtaataggacaggaccaggcaaagaaggtgctttcggttgctgtttacaatcactataagagagttctggcaggtgatacatcagatgtagagcttcagaagagtaatattctcatgcttggacctacaggctcaggaaagacacttcttgcgcagacacttgccagagtgataaatgttccatttgctatcgctgatgctacaacacttacagaggcaggatacgtaggtgaggatgtggagaatatcctattaaagcttattcaggcggcagattatgatatcgagcgtgcagagcatggtatcatttatatagatgagatagataaaattacaaagaaatcagagaatgtctcaatcaccagagatgtgtcaggcgagggtgtacagcaggctcttttaaagattcttgagggcacagaggcatctgtaccgccacagggcggcagaaagcatccgcagcaggagcttattcctattgatactactaatatactttttatctgcggtggagcatttgatggtctggaaaaaattatcgacagtcgtatggatacatcatctataggcttcaattcagatgtaaagtcaaagacagagctcaatgtaggagaggcgtttaagcatgcactcccacaggattttgtaaagtttggattgattcctgagtttatcggacgtgtacctattaccgtttctctcgaggcactcgacagggatgcacttatccgtatacttaaggagcctaagaactcgcttatcaagcagtacaccaagctttttgagcttgacggagtagggcttgagttcacagacgatgcagtaaatgccatcgctgacaaggcacttgagagaaagacaggggccagaggacttcgtgccatcatggaggctgttatgcttgaccttatgtatcgtataccgtcagacaagagcatcagcaagtgcgtaatcgacaaggatacagttgaggaaaacttaaagctagatggtgagtgtgtgccggaggcatatatcgaggaaaaagcggcatcataagtacatggcggtattttacaaaagatacagcatcggataatataaattgcacagcggtttgttatgcatggctgtgcaataatacaggagatataagtggaagaacagattatgaatatgcctgcagtagcgctgagagggcttactattctgccggggatgattgcccatttcgacatcagcagagagcgctcccttcgtgctgtcgaggaggctatggagcaggatcaaaagatttatcttgtcacacaaaggaatgtggacagtgaggacccgactcaggaagacctctatcagatgggtattgttgctgacataaagcaggttgtcagattacagaatgatgttgtgagaatacttgtagatggaataagccgggcagcattgcttggctttaccggtaatgagaagtaccttgaggcagaaatctgttattgtgatagtaatgcagacagcctgccggatgatctcagggaagccatgcttctcggagtcagagaggcttttcacagatatgcggcagtcgtcggcaaaatcagcaaggagcttatcagacagatagatcagtatgaggatcttgaaaagctcattgattatgtaaccaacaatctgccggtgtcatatgagcttaagcagcaggtgcttgaggcagaggatatcaatgacagatatcaggttatagtatcattacttctctcccaggtggaggttatttccataaagaatgagcttcagaaaaaagtaaaggttcgtgtggacaagcatcagaaggagtatgtgcttcgtgaacagcttggtgtgatacgtgaggagctgggcgagaatgctgactcggaggctgatgaatatgagaaaaaactatctgagttagatgcgcctgactacgtaaaggaaaagacgaaaaaagagataaagcgctttagaaatatgagcagcagctcatcagagagcacagttgagagaggctatatagagactgtacttgagcttccgtggaacaagatgtctgtggataacaaggatcttgaccatgcagcacaggtgctcgatgatgatcactacggattaaaggatgtcaaggagagaatacttgagtttctggcagtcagaaatctgacaagcaagggagagagtcctataatttgtcttgtaggtcctccgggaacaggaaagacaagcatagcccgttcaattgcgtctgcactggagaagaaatatgtgcgtatttctcttggtggcgtgcgcgatgaggcagaaatccgtggacacagaaagacatatatcggcgctatgccgggccgtatagtaaatggcttaagacaggccggcgtttcaaatcctctcatgctgttggatgagatagataaggtgtcaagtgactacaagggtgacacatcagccgctcttctcgaggtgcttgacagtgagcagaactgcagattcagggatcattacatcgagatgcctgtagatttgtcggaggtgctttttattgcaactgcaaatgaggtttcaggcattccaaagccgcttcttgacaggatggagcttattgaggtgtcaagctacactgaaaatgagaaatttcacatagcaaaggaacacctaattgagaagcaaaagagcaaaaacggaattaaaaaggaacagcttacgataacagatggtgctttaaaggatatcatcaggctgtacaccagagaggccggagtcagaagccttgagaggactatcggcaagctgtgccgcaaggctgccagggaaatcttcaaggacagcgaagctgctgtaaaggttacaaagaccaatcttaagacgtatctgggcaatccgaagtacagtccggagaagaaaaatgatcacgcagaggttggaattgttagaggcctggcatggaccagcgtgggcggagtcacactcgaggttgaggtgaatgtgctgccgggcaagggtgagctcgtgctcaccggtaagctaggcgacgtgatgaaggagtcggcacaggcggcacttagctatgtgcgctcaataagcgaagaatatggcattgatgcagagttttatacgaagcatgacatccatatacatatcccggagggcgcagtgccaaaggacggaccatctgcaggtatcactatggcgacagccatgctctcagccattacagacagagctgtcagggcagatgtagccatgacaggcgagataacactgcgcggcagggtgcttccgataggaggactcaaggaaaagctgcttgcagccaaagtaatcggaataaaaacagtatgtattccaaaggataatgaaaaggacctggaggagatttcaaaagaaataacagacggcatggaaatcgtgccggtggagagattttcacaggtggagaagatagcatttgtaaaataagaatgaggaagagattatggtaattaaaagtgttaatttagagacagtttgcggaattacaagcacaatccctgacaatgagtataatgaagtggcattcgccggcaagtcaaatgtaggcaagtcgtcactgatcaacgcactcatgaacagaaagtcacttgccaggatctcttcacagcccggcaagacacagaccatcaatttttataacgtcaatgacgccatgtatctggtcgatctgccgggctatggctatgccaatgccaatatcgagataaaagctaaatggggacagatgatagaaaactatcttcacacctccaaaaagcttcaggcagtgtttcttttaatagatataaggcatgagccatcggacaatgatatcatgatgtatgactggatggtaaaccagggctttgcaccgattatcattgcaaccaaatctgataaattgaaaaaaagccagattgccgcacacataaagactatcaaggatgtgcttcatgtgaagccgggcacggtagttataccgttttcgtccatgtcaaaggaaggcagggacgaaatctggaatctcatagattcactcgtgtttgacgaggagacgcttcttgccatgaaacaggaggaagaagcaaagcgcgaggcaaaatcagctgcaaaaagagccgctgcatcccagccacacaaaaaggagcgctggaagaagaccggaaagccggttgccaaaaagactaaagaacgcagagataaggccaagagcaaaaaaagcgttaataatcataaaaagaaataaagctatagaaagaaaggcgaatatttaatatatgaagaataaatgcaaatttgtaggcattatgtttttgtgtatattgatagtgtgtacgcttgcggtaatggcatatgagcacacagcaggtatgaaaggcgctgccggtggagcatcaaatgcttcgggcaatacaaaaaatacagacgaagctgatgatatgcttacagtcgtgacatccttctatcctatgtacattgccactttaaacatagtagacggagtggaaggtgtgagacttgaaaacttaagcgagccacagaccggttgtctgcacgattttcagctaacaccggaggatatgaagcttttatccacagccgatgtttttgtaataaacggaggcggtatagagtcgtttatgtctgatgtggcaaaggcgtatccgaagcttgatgtggttgaggcctgtgaggatgtggcacttctttctgaggatgatgcagacagtgaccacgaccatgatcacgacgcagacacagaatcggacagtgaccacgaccatgaccacgaagcagacgcagaatcagatagcgcgcacgatcatgaccatggtgatgagaatgcccatgcatggatgagtgtgccgcgttaccgcaccatggttcagacaatcgcatcccggcttgccaaaaaggatgcaaagcatgctgatgaatattatgcaaatgcaaaagcatatgatgcaaagcttgcagtgcttgaagaaaagataaatagcataaagagtcttaccaatggacagaatatcatcatattccatgaggcctatgcgtatgtagctgatgatttttccatgaatgcatgctatctgttagaccttgacgaggagcgctcagtcagcgcaggtgagataaagcaggtaataggtgccataaaggatgacggagtgtcggtaatactagctgaggagctctacggaaagagcatgggagataccgtatcgcgtgagacagatgtgcatgtgatttatatcgaccctctcaacaggggagagtacgacaaggacagctatctttatggtatggagcacaatatagagcttatcaaagaggcatttactaaataaaattggagaaaatatgcggaaaataatacagccatgtggctttcattgcataaaaataaataaccttggagtgagctttggagagcagacagtgcttgaggatgtaaatatgcacatacattgcggctctttcaatgtcataataggccagaacggtgccggaaaatctacactcataaaggcgatactcggcgagatacctcacaccggtacgattgagttcaaggatactaaggacggacatatggctaagcttaaaatcggctatgtgccgcagtctgttaatatcgagaaaaatacaccggtcagcgtgtatgacctcatagcaagctatcagtacaattatcctgtttttctgccaaagagcaaaaagatagaggcaaagataagggagacactcgaggtatttgaggctgaggagctcatcgacaagcaggtgtgcaacctctcgggaggacagctgcagagagtgcttctttccatggcaatcatggacgagccgaacctgctgctgttggatgagccggtgtccggaatagaccaaaacggcatggagcttttctataagaccatggattatttaaagactcactatgaccttgcaatcatactgatatcgcacgatttggactatgtggcaaagtacgcagaccatgttgtgctgcttgataagaccgttgcaaagcagggaactgtgaaggaagtcttcgagagcaaggaatttgagagaattttttacacaggagaggaatcctgggtgagagaggaggaacacaaatgaatataacctcctggcttcaatatgattttatgagaaatgcccttatcgctgtgctcatcatcacaccgctttttggcataatgggaaccatgattgtaaacaaaaagatggcatacttttcagatgcactcggacattcagcacttacaggaatcgctgtcggagtggtatgcggcatggcagacacctcgcttgccatggtgatatttgcgatagtgtttgcacttcttttaaataagataggcagtctgaacactgcatcgacagataccattatatcggtattttcatcgtgctctgtggcgataggtcttgcgatactgtcaaagggcggcaatttcagcaaatactcaagtatactggtgggcgatgtgctaagcatcacaaagactgagatagtttatctaattgtgatttttgtggtcactatagtgttctgggtgctttgcttcaataagctcaacgccatatgtatacacagaagcgtggcaaaaagcaagggtatccatgtgcgtcttctggataatctgtttgcggtgcttgtagcactcatagttatgctatccatcaagtggataggcatacttatcataaatgctctgcttatattaccggcggcttcatcaaggaatatttcggaaaatatgcgtgagtatcatttcttttcagtgatattttcagtattttccggtatagtcggcctcgcagtgtcatactacaccaatgtggcaacaggtccgatgatagtgattattgcatcggtaatatatttttcgacatttatatttggcagaaaattgaaaaaataacggcaagggctataagaaacagatacaaaacagccgatacacaatataagagataaactgtttagctatatcagacgctatacaggttgataatagtatagcgggaaaggattcccgcacgcacattaccagggagggatgagaaatgttagatgctatttcaagtgtagtttcagcagtagcggcgcagagtgtcacagcaaaggacgaggcgcagacaaagaatactaatatcgcttcaaagaagcaggatgcaaagacggataagtcggatgcaaagactgcaggcttcagcgaggaggcagctgtatatgagaaatcagacagcaaggatgattcaaaggatactgcaaagggcacagtaaaccagaagatgagcaaggcagacagagatgcactggtacaggcacttaaggatgatgccaatgccagacagcagcagcttatcgagatcgtcagaaagtccatgacaggacaggcttcaacctgggacaagtcacagggcttaaagagtctgtttgagaatctgactgtagatgcagacacaatagcgcaggccaaaaaggacatcgcagaggatggatactggggagttgagaagacctcagaccgtattcttgactttgcaaaggcactgtcgggaggcgacaaggacaaggctgatgagcttttgaatgcattcaagaagggcttttcacaggcaacaggagcctggggagacaagctgccatcaatttgccaggatacttatgatgccgtagtcaagaagtttgatgactggaagaatggcacagaggacacacaggtacagggctagaagccggatgtgtatgtaaaagtgtcgtgatggaacgaatattatataagaaatctgatttatgaattatgaaaagggggctgcacgcagcgtgcagtcacctttttagtgcttgtataattttttgagaggtgtataatagaagaatagtatataagtatcattattcatgtggaggaaatatcatgaaattagacatgtcaaagtggaaagcacttagcatcaaaaatcgtttaaagaaaggcttcagactgactacatttgtagcatcggcatcgggggttatcgcgggtattcttatgattcttgtatcaatgagatattccagcgcactaaccttttacggattttcacagggagatataggaaaggttatggtaaccttctcagagacacgaagcgctacacgagctcttatcggttatacagcttctgacacattaagtaagatgtctgatacacatgattctaaaaaggaatcatttcaaaaatactggaaagagctgcaaagctctataaagacagatgaggagcaggctatatatgatgatataaacagtaagctcgactcatactggagtctcgatgatgaaatcggacagttaggtaggaatgctacagatcctgagacacagaaggaggccgaggagagagcagtagcagagcttgcacctgcatatgatgatatatatcagcagcttgttgcccttatggatacaaaggtaacagatggagataatttaagcaagagattatcattagtatcatatgccgtatttggtattgttattgttatcattgtcagttcatattttatctcgatgaaaatcggggacggagttgcagttggtatttctaaaccactcgatgagttaaaacagagattacgtacatttgcacagggtgatcttgaggctccattcccggcagttgattcacaagatgaaattgctgatatggtaggggttgcgaaaaacatggcagcagaccttaagactatcatatctgactctgacaagcttcttggaaagatggcagaaggagattatacagtttcatcagacatggaagataaatataccggagattttattggacttctcatggcaatgcgtcagatgaagacacagatgaatgatgttatgtcacatatcaatgagatatcatcacttgttacagcaggttctaacaaccttgctcaggcagcacaggaaatagcagaaggtactatggatcagtcagcagccattgaggagcttcaggctacatttgcagatatcacaggcggtgttgagaaaacatctgagaagctcaatgatacatacaggattgcacaggagtatgctgaggaagcagatcacagccatacagagatgcagggcatggttgatgttatcggacgcatcaatgatacatctaagcagattgagaatatcatttctgagattgaggatattgccagtcagacaaaccttctttcactcaatgcagctatcgaggcagcgcgtgcaggtgaggcaggtaaaggattcgcagttgttgcgggacaaatcagaagtctttcagagcagagtgccaaggctgcggttgacacacgtcagcttatagagagtgccattgcggtatctaacgagggtaatgaagctgcagagcgcgtaagtacttctattgaaaaggttatcaatggtatgaaggaagttgcagattcttctcaaaaactcagcgagattgcagaggagcaggcaaaggctatggagcaggcagaggccggtattaatcagatatcagatgttgtacagtccaactcagcaaatgcagaggaaacatcagcaacaagtgaggagctttcagcacaggcggagacaatgaacgagctgattagcaaatttatattggaaaagaaatagaaaaattgtacatacgagtttagagaaactttttaaaaaaagccccacaagcattattgatatgctgtgaggctttttgttgtggcgcgttagagggttactttttaaatctagtaaacatgtactatgtgaacatagttttttgtgcgatacgtggaaaatctgaaaagtaatgaaaatgaacaattaaatgagaatatttaaatttgctctttttggcagggtgtgttataatccttgtatacaaaaaacagaggtaatacaatatgggtagtaataacgatatttcattaaaagcattagccaagattaatctggggctcgatgttgtgaggcgcagagaggacggatatcatgaggtccgtatgattatgcagaccattcatctgtatgacaggcttgatatcaaaaggacaaaggagcctggcatacagatacagaccaatctgtcttttctccctgtaaacgagaacaatctcatatacaaggctgcaaagcttctgatggatgagttttctataactgacggtgtatcagtgaagctggacaagcgtattcctgttgcagcagggatggcggggggcagtactgatgcggcggctatgcttataggtgtaaacaggcttttttcactgggactgacaaagagagagcttatggaaagaggtgtgcagataggggcggatgtaccatactgtattatgagaggcacggcgctggccgagggcataggagaggcgcttagtcctcttcctccaatggtaaagtgtccggtgcttattgcaaagccgtccatctcggtatccacaaaatttgtgtaccagaatctgaagcttgatgatacgactattcatccggatatagaccgcctgatagatgatataaaggctaagaatctgcatgatatcgcagcacatatgggaaatgtcttagagaccgtgaccataccaaactatccggtgatagacgagataaagaagcatatgctttcaaatggcgcggtaggagccatgatgagcggtagtggtccgacggtttttggtctgtttgacgatgaagatactgcaaagaaagcgtacaaagccatgagaagctcacatcttgccagacaggtgtatctgacatctgtatacaataatcgcaaataacgtgatatccggatagcacagcgggtgctttatagttacttttttcttatatgtgagaattataatacaagagataggagaagtttgatgactgataatttaactttaaatatggatgcatatctgccactgcgtgatgtggtgtttaatacacttcgtgaggcaattttaaagggcgagctcaagccgggagagagacttatggagctgcagcttgcgtcaaagcttggagtcagccgtacacctatacgtgaagcaatcagaatgcttgagcaggaggggcttgcagtcacaatgccgagaaagggcgcagaggttgccaagatgactctcaaggatatggaggatgtgcttgaggtgagagaggctctcgatgagcttgcagccaaaatagcctgtaagaaaatcagtgatgagcagcttgcgaatctaaaaactataaaggacgagttcaagaggagcatggactcaggagatgtgaaaaagatagctgaggaggatgtgaagtttcacgatgctatctatgaggcgaccaacaatgcgaagcttgtatctatgatgaacaatatccgcgagcagatgtaccgctacagagtggagtatttgaaggacccaaagaattatccgatgcttgtgaaggagcatgacgccatctacagggcgcttgagtcaagaaatatggagcttgtgactacagaaatgcatacgcatgtggcaaatcaggcggttgctgtgaaggctgtgatacaaaagcaggatgaagagaagaaataaaacagaaataaaacaagattatagcagacaaagataataaaatacaaaataatataacaaaaccaggggctgccggccgcactgacgtgtgaacggtgcccttttttagtggcttagttagtggcttagatagttacaaaataaacaatcagggatatttgcgagcttgtatggtcatactatatcagggattttaaatctgacgggatttattgggtatataggagagttaaagatgaccacaaacatagatgagaacataaaaagcttcaggcagatatattctgactgctcagatatcaagatgcaggagatgtatctggggcgtgatgcctcaataaagtgttttgttgcatatattgaggtgacatgtgcaggctccggtatcaataacagtgcatttggacgatttacatcataccttgaagggatagaccgggatcaggttaaggaagtacttgacaaaaatcaggcagctctatccgaatttgcgcatcttcatacggttagagaggcagcccagatgatgctgacaggagacgtgatattttttgtggatggctatccggatgccttcaagcttcccgacaagggatatcctgccatgtcaattcaggagattgattcggaaaaggtcataagaggctcaaatgagggctttgctgattccataaagataaatactgcacttatcaggcgcaggttaaggagcactcgcttaaagtgtaaagaggtgaaaaaggggcttcgcggacacagcaatgtggacatactatatgtgagagacctcgtaaaaccgggacttgtagaggatgtggaaaggaatctggacagctatgtgatagaccatgtgggggattcgggagttcttgaacagtttgctgaggcaaaatggtattcaccgtttccacagcttcagaccacaaagcggccggatgtggcagtaaatgtgcttctagaagggcgagtggtggtgttgtgcgataattcaccgatagcgataatactgccaaccaccatgaacaattttttaaaaaccgcagatgattactataacagaacgatagcggcaagctttgccagattgataaggtacgtggcagccttcatgtcatttacattgccggggctttatctggcggtcacaaattttcatacacagatactgccgacacctctcatactggcgttttatgaagcaagactcggctgcccgtttccacagctcatagaggtgctcatgatggagctgtcctttgaactgcttcgcgaagccggcataagacttcccggagccatgggaaatacgataggcatagtcggaggcctcataatcggacaggcagcagtggatgcaaatttagtgagccctatagtggtcatcctggttgcattcaccgcactctgctcgtttgccataccgagtgaggagtttgcattttcatttaggatactcaaattcgctgtaataattatgtcggcatggcttggatactttggatttttaataagtctgatggtgatacttttgcatcttgcaaagctcaaaagctgtggttatccatacatgatgccattcgtgggcagcgagctgacaggcggcgaggatgaaaaggacagtatcatacgatttccgcttcgaagactttggaggcggcctgtatttgcaagagaaaaggagtgcaggaagctgaaagaaaatcggacaaaataagttgatgaaaatggtaaaattgtattattgtaattaaacaatacaaatgataacatatatattatgtatgaatttgcgcgaaagggagagaggttatggaacaaaaaagaaaagaagaaataagaaaaagtataattgcctgtgacaatgatatagttaaactcagatcacaggctgaaaatcttgaagaaatcataaaaaatcaaaagtgcacgcaaaaacgttttgagagtgaatgcgataagtatgaaatcaaaaggcagaaaaaaaagataaaattagagaatatgtcatgtttaatacagaatgttaagctagttgaaagatatgtaggaagaatgagcgatcgagtatctggcaattgttataatgttaacagtaatagattattgaatatgatgaaacagatggacaaagagattcttaataatgaaaatatgttagaagaaaaatatgacatgatttcttcaataatgtataaaagacaaatcttaaagtatgaactgaggaggttgggatagtggcagttatgaatcctttgggaagtagaaatataattattattgatgataattatataggagagtattcacaggcatatatggaggtgggaaaacagatagatgatattattattaaatatatcggaatattaaaagggattatagatgatggaagtatgaaaggacttactgccgaaaaattatatagttttgcggacactgcaagcatgttactatttaagacagcaggagttttgtgcgataacaataaaagcaatatgcaaaaatttatacaggatattgatgaggcagacagagaaatttactaaggagaatatgttatgagcaatgttttacaaattgatagaaatggtattgatgaagctgttaacgacttacaggaattgataaatgaaataaatgaagttaatatttcaaaaagtaagcaggaaggtgatgaaggcatggcctacactgccatacaagagggagaaaagataattgaaaatgtaaagacggatttacaaggtcttatacaggcaacggctgattttatcgtaaaaataaatggtaattttgaagatacagaccagagatgtgctgaacagataaaaggagaagtaaaataaaatgggacgaataagaaaatttacacaggaggcttatgatgcgttgcagtcaggagtttcagatgatggtgagatactggatttttttagcgatataccattaaatatatcgaatttttttaattcgcttgaacttgaagatgatttgtcaaattttcaaagctatctaagagatatatcagattttgagaattatacagcaaaaaagattgatgatatttttagggatgtaattaatgttgatgaaacttatgcaacaatatttagagattttaatgataggatgacagattttgatactataattaataaattaaaagagtcaatttcagatgtgaattttgagaataacttttcaaaagatggatttataaattcgcttccaaaggaaacagagaatataataggagtaaattggaaaaatatattagataaagatgccgatgacatatcagatgaagaatacaatatgattgcggaatatattattaaaaatggtgatgccgacattttagaggaaattctggtagattgctatacgattaagaaaccaaagaacggagaaagaaatcctgttgtttttgataatggtattgaaggaaagacagaaaagtattggtactctttaaataaaaaatataatgggttatctgcagctataaacagggttacacaaatatggattgcaataggatatacatcagaaagtgatgaaagaaatagatggatttctacagcagcacagtataatactttttttaaagagtttggtaaaaataaagacctggttatggtaagagaaataaagctggatggtactataaaagagttaaattctaatcttattgatattaaaaataataaagccggagatttgactgctgtgtattatccatatttttcacagccaacaataatagaaggagaagtcaacaataaaaaagtaatgaccacttcatttgctggatttgatcagggaggacaggatgatcttgcgaacaaagggataaagtacataagggcaaatgcaggagttgataaaaatacaaatatgcttggtacgctgtcggatagtgtagtaaatcagataacatcttcgctaattggtaaaatcccggggtctgggattatatcgtcagtttgtgatatttgtgataatagtgagagtaaattagaaacagcggaaacaatatcggtgagtgaatttgccaatcacattggttggattgttgatgaatttggactaatatgtgttgcaaatgatgtaaatgaaaatccagagacgtgtaagatatatttatatccaggaccggaaacgaaaaagattgttgaatcctataataagtacatgaaagagcatagagattttgcgattgaaattggatatcctaaagatgggataaatatgtcttggtttaataaaactaaaaaatatgaagatatatatattattctaaattgtataaaaataatgaatagagatcctttgatttttaatgtgattgaaaattataatgagggggaatagtggtatgataaaaaatttttataaaaaaaagaataatctatatataatgttggtaatacttgtggtaatattcgtggtgatacttggatatatatacatgaatcgtcatgtaaaatttaaagactccaacatggcatatgagataagcagaacaattggaccaaacgttaatccagagaatgtaaaatataaagatgtatatgctataaaggaattgaatataggttttccaggaaagtatgatactttagaagatataaaactttgtaaaaatttgaggatattaacaataaatggtggaggcgataaatggaagccattaaaaaaagaggaagacattgattttttattatatgagcaggcacaaaagtatcaaaaagaattatcagatatagtcccaagtttgaaaagaatagaaattttttctttttcaaattatttggaaaactgtaatatttcaaattttgattttttagcaaaatgctgcaatatgaaagttattaagatttacgatagtacagttagtgatttcggttttctcaaaaattgttcaaaggtaaaagaaatatacttatggggtagcaatataaaagatgcagatgatctaaaatcgctaaagaatctggaaacgatatgcatatatgatacccctttgtcaaaagatgaaactgaggtagaaagcctgtgtaaggcatttccaaatgcaaagatattcataagtgaggataaggtgcagaatattgacataaaagaggaatagggaataccaggataaaaatgatagattaagaattgtatattaattgtattttatagccatactttactttgaaaggaattaaagtatggctataaatatgggtaaaagagatacatttgcacaaaacgaaagcatatcgccccgccagctatacagactatacgtctttaatctgcttggagtcggcacactggtgcttccaaacaatctggcgaaactgggaaagtatggttttatctcaatcgcacttggtgttttcatggcatggctatttatgtggatagtaagcgaggtacgagaacagaagaaaagtatatatgacagaagctttggtaaaacaacacatgcaaaaatgttaatttatgatttaattattgtgatatacgaactgtcacaggccgcatttcttgcatggatatttgtaaagctgatacgtgacagccttataccggatgagtcatttacagttgtacttcttgtgataatggcagtgtgcgcttatgcgctaagtggcggagtggagtgccgtgccagggtatacgaggtagtatttttctttgtgctgataccgcttgctgctatgcttttgtttgcgctatcggatgtgagattagactatctgatgattaaggacagagtcggtgtggactttggcatagcggatatatttgcgggcgcatactatgtgtttgcagcatccatttccgtgttcaatatactgtttgtaagggagcgcactgcctcacagatacgatggagtgtgagtaaagcaatactcacatatgcaggcattctttttttattgtatgcagtattgcttgggagcttcggaaaatattcattgtcagaaatcgagtttccggctgtcgtactgatgagtgatgtgcagataaagggaagcttctttaagagggcagatgcactgatgctgtcggtgtggtttttcacgctgttttcagtgctcattatgagcctttattatgcggttttaagatgtgagaattttgctgaaaatacgagagaaattatatttacatttaataaaaaccggcattcctgtagcaataagcaatttggctctgacagacagaaaagtcatgacaaggaaaagagcactatgagaagctggtgcatcatttttgtcatagcagtcacagtgaccttagcatatattcttgaaagtggagatgaaatcgtgaaaaaatatcttggatttttaatgtgcatagcgataccggtcatagtagtgctgacgataggtctcatgcttaccggctgtagtgcagtggagcttgaggagcgttgctttccgacacttgctgcggtggatgttgtagctgtagatactgacgaaataaccgataaagaagtaacaggtaaagatgtaactgattacaaagaatatgttagccacagagatgatttggcaaatgaaagtagcggatatatagagttttattataacatggacaaatcctatgagcccgaatatgcagatgatatcaaaacagccgtggacagcttcgaggagcggctgtcacaaaaagccgataccaatcatctgaaggtgatattaataggaaaaacgcttagaaatgataaagcagcttatgcaagcttcatggaatactgcaagacatccaaaaaatttccgagaaacacatatgtgtgcatagcagatgatataaacgatatctttgataacatgggtgattattatgagcagaaaataaataaggagaatcatgaggatggtgaaccgataattacacttggtaccttgctggatgactatacgaatgaaattcatgaaatccggtaaaattttcaaaaaagatgaataagctcgtcaaataaggcaatacttgtttacatgagaaagaaaataataataacaaccatagcaataatatccattacggcagcgatagcttcaaaaaatcatacacctgccgcaaacaccaatagtatagcgtgtacagccgacatgcaaaaatccatcgccggcaaaatcctgcgttttcacgtgctggcaaacagcgacagcgaagcagaccagaatgtgaaaaagcaggtgcgcgatgcagtaggggcttacatagagccatatctgctggagtgcgaaaatatcgaagaaaccagagccaccgtaaatgaccatatggacgaaataatagcggtatcaaaggagacgcttgcagaaaacggttttacatatggcgcatcggcagagcttacacacaccgatttcccggaaaagacgtatggggactatacatttcctgagggaaattacgaggcgcttgaaataacactgggcgatggagccggtcataactggtggtgcgtgctgtatccaaacatgtgctttaggggcagtgtgtatgaggtggtggaggacgaagcaaaggaaaatcttaaggaggtactcactccggacgagtatgagagcatatttgacagtggaaaatatgaaataaaactaaaaatccttgatattttcagataaaacagttagtatattcatgctgaaaaaatatattaaaagaaaatatgtgatgagaaattattaaagcgtgaattaatttagatatgcaagaggataaggagaaagaaatgacaaaggatgtagtagtatcattaaagggcctgcagctcgcaccggaccagcagtcggatgcggtagaggtgattgccccgggagagtattatataagaaataacaaacactatgtgctttttgaggagataatggagggggagacccagacactcaaaaatatgcttaaattcaatgacaattatcttgagttcacccgcaagggacctatgagtgtacatatgatatttgagaagggaaagaaaaacctgacatattattatacaccgtttggaagtatccagataggtattgatgccacaagcatagaggtaaaggagactgaggacgagataagggcagaggtaaagtatgcacttgatgtcaactatgaatttgtaggcgactgtcacatcaatatagctgtgaagaaaaaaggcgcagcagtcaaaattgcataaaagtctgccaagcctatgggtgaaaaatatacaaagcatatatggatagagcatataaaaaacagagcatgtgaggatgaaagccatcccacatgctctgtttatgtacatgaaaattaaatcatgatattatttctgcttagcctttttggcagcctctttagcagcttttctttcagcctttgcagcctcctcagccttgagctgttcgttggccttgctgtagttttctgccattcttgcacggaagcctttcttcttcttaggcttctcaagaggtcctctgataccgcggacagctgtgatgtagataccgctgacagaagccttaacctctttctttaaaggaatctcatcaaagatctgctcgtctgcgataagagacatgactcttggtccgaccttggccttgactacaggaagctttgagcggcgcataagctttggtgtctgctcaataatttgctgtgggagaccggcatcctttagcttcatacgctttttgtcaatgattagcatattgactgtctgtgatgcagcagctatctgttcgtcctgctcttcctttcttttttgtgcttttttaccgaggattgttaatactataaatgctaccacaagcactactgcgataacaataagtacgattaatgctggattcaaaacgtatccctcctaaaaatttgcttatttaaattaattctatcaaatatgctaaaaaaaatcaatctttattgcaagaataggtaaaaccgtagtataatagaactatatcttggaaaaactctttagaagacgcaaaggggtatttattaatgaagaaaattgctcttctggctgatggctggagaagatatgtaatatattcgtgggttgagggtatcatgggaggctctaaagagctgggactggatgtgtgcctgtatttttacaacaccaacggaacctggagtcaggattcaaagtttaacaaaggcgaatatgcgctgaacgatttgcctgatttaaacagcttcgacggagtggtatttgactgcaccaatacgaccaacctggatgagatacagtatatggtcagaaagcttcagtcggtaaatgtgccggtagtgagtatcgggtataaggttgatgggttttactatgtaggcaacgacaataagaggctgtttcgcaaggtgatggatcatatgtactatgcgcatggctgcaaaagctttgtgtttgcaggtggtccgccgtatcattatgagaacagaatgcgttttgaggccttcaaggaggctttaagtgattatggcataccacttacagctgatatgtacatgtttggtgattttgattatcagacaggtgtcaggtatatgagtgattggcacgagagcaaaaagccgttaccggatgtctttttatgtgcaaatgacaatatagcagcaggactgtgtgcgacagcagaggttcttggatacaaggtaccacaggattttaaggtcacaggctttgacaatctggataaggctgcgtattttaacccacagattacaacagtggataacaacaggggcaatataggcagaaatgctcttgagatatttaaggcgctttggaatggcacgggcgatgcttctgataaataccttgattctgagtttatcccggctgagagctgcggatgccctaataccggcagagtggattatcgtaattacataaagaatattatcaaaggctccgttgcaagagagcaggaggaggatgcagtaatgatcctccagaaagagctcgaggagtgcaatgaatactatgatttgtttgagagatactctgactatatacagagcatgaagtgtgacggagtgtatgtggtcggtgtttctgatctggcagctgcaaggaacaatgcacactttaggaagcatggctatgatattgacgacgaggttgtactctatgcggatgacaaggacaatggaaagcttgagtttaagagtgtaaatgaccttatgcagtacatgcagagtgtagataaaaacacctgctatatgtattgttcgctgcatttcagggacgagatagtgggctatgtaatactcaggaatcctgagtttttgtacgaccatcctgagcagtttgatatacagtctgccctgctcaagaggcttgagaatctttttaagcaaaaggtacttgagaatacaaataatgagcttaagaatctctacaaccatgatgcgctcacaggcctatacaatcgtgtggcatgcaatgagatggtcattcctatgtttgctgagcttgaagctcaaaatgtcggctgcaccatagtatttctcgatgtggatgatttcaaggacataaatgatacctacggacaccagtacggtgacgagcttttaaagactgtggcgagggtgcttgatgagcaaaagcctgagggaagtatggtatatagattcggtggagatgaatttatcgtgtttatccctggggacagacatgacactgctgagaagtatataaagcgcgtgtatgatatcatggagcagcacagcctgtttatcagtcacggcatcatatatacgaggccgggcagtggtaagagctttgacgattatctagtaagtgctgacacaaagatgtatcagcttaagcagcagcgcaagcagaaaaaggatagcaatttcttaaagggagtggatatttcatccgttcctatgatggttgacaataatatacaaataatggacagggaaggtcatgtgtgcagggtatttgattttttaaagctgaataatgtaaattcagtccgtctgcgcatatggaatgagcctgataaggtgccggagtctaaggggtattgcagtcttacatatgttctcgagatggctcatgtcattaaaaaatacaaaatgcattttctgcttgattttcattattcagattactgggcagatccgggacagcagaataagcctgatgcgtggaagaatttaagctttgatgagctgaaggaggcagtgcacaagtacacatatgatgtgctatacagattaaaaatcatggattgtgcgccggatatggttcagattggcaatgaaataaggagtggtatgctgtttccggatggtgcagtgccacagtacaggcagctggctgcgcttgtaaatgagggaatcagagctgtcagggagctgctcccggagacaaaggtcatgattcatctggatcagggaggcagatataactgtattatgccttggtttgattctatgtttaatgcgggcatgctgccgattgacgcgattggcctttccttttattcgttctggcatggtacattcatggatttgaaggatactatgagcaggctcataaaattatataatctgccggtttatattgtggagacagctcatccgtggaggcattgcaagggagatcatatcccgaaggaactcatggagactgcaggtcttgatgcaggcagcgcagagcagaagaagtctcttgaaataatcatgcagatagcagcagaggtgtcaaaggataccggaaagacaggtgtatactactgggagcctgtcggtgtgcctggtaaaggcatgggaacctggtttgagaatatgggtatgtttgacgagcatggcagggctttgccgggctgggatgcaatcagggactttgatccgaaaaatccgccgattaaagagcttgataagtatattgaatcactttatgagtatgaagaaacaccggaggtggaggatttcatgaagcttcttatgattcatggaaatctaatctcaaatcctgaatttaaggatggatttaataattggcagattgagacaagcctcgaagaaggacagtatacactgggtaaggatggagtgtttatctcttcagatgccaattttgactattcgataagccagacggtggatattgaatataccggtgagtatatagcagcggttgactatagaggaaccaatacaacaggtgtcgatgtcgagctgtttatggatgtggaggatgaaagcggcgttcatacatatacaagcgacattttcccggatgatatcaggtttgtgacacatctgcttaagccggtaaggctgcaaaagaatgccagggtgacagtagggcttaggatgcatactcctccggtgtttgcaaagataaagaaattttcactcgttgtaatttaacctgatatgtgatattgtagacaggtatagtgttttgcggatgcgtttttgccgtggcagggcattgtacatataaataacatgacttacagatttcaggaggattccaatgagtgagaagaagaatacaggtaagaaggcagtcatagcagtgattgtgattgcacttatcgtggtaattattgcgcttgttgctgtaataagcggcaagagcaaaaagggtggctcaaagagcgcaacagaggcaggcactgaggccggcagcgagacgatgcgaagcggacagtttgacatagactacgcaaagcaggttacaaagcttgcagactattcaggtattgcaattacagtctcaaacgattatgagataaacgatacagcaaagcagaaatatctgaccaatgtgcttcagtcatatggtgcagatgcgtacaagcaggttacagatcgtgatacagttgcagatggcgattatgtcaaggttgattacacaggatataaggatggcaaagcatttgatggtggctcagctacagatgtgatgcttgatgtgacaaacaacagccaggtcggcggttcatcctttattgatggatttacaaagcctataatcggagccaaggtgggtgacaaggttaagggtgacgtgactttccctgaggattatggcaacgatgacctaaacggacagacagttacatttgagtatacagtaaagggtatttactcagcagatcctgttgcacttgctgatatgacagacgagcaggtcaacacagtgtttggaaaggccggagtgacaacaaatgcccagcttaccacacagattgagaaagatttgaagcagcagctctacagcgctgaggtggacaagataaagagctacatgattgacaacagcacagttgagattcctgatgagtatctacaggccagactcaatgagtatattgcttcatttaccaaggaaaatgtcaaggatggacagacacttaagaaatatttaaagtccaactacaacatgacagtggatcaggccacagagaagtggaaggagaatctgacagaccagataaagacagagttcatctttgggcttatcgctgagaaggaaaatatcaagatggatgatgatgccttcaacagctatgtggattacatcgtatcagccagcaatggccagttcagcaaggcttctgaggtatacaagtattttggaagcggacacaaggatgagggaaagacataccttaagaaccagtaccttgtaaacaaggctattgatacagtcacagagaaagcaaatgtgacatttgaggatggcagtgcagcgccggatacttcaagtggcagcgcggatgccgaataataacgataaatatgctgtctgtggtgatgcgcaggcagcttaaatggaggattagataatggaacttacaaacatacgcgagattttccgcaacaaggacaaattcgctgacaaagaggtgactatcggaggatgggtcagaagcaatcgtaattcaaagaattttggatttatcgtggtaaacgatggcacattttttgagccaatccaggttgtatacggaaatggcttagacaactatgatggggttggcaagatcaatgtcggagctgcaattatcgtaagaggtacacttgtgcttactccggatgcaaagcagccatttgagattcaagccgcagaggtgactgttgagggtgcatccacaccggattatcctctgcagaagaagagacatacatttgagtatcttcgtacaatctcacacttaagacctcgtacaaatacttttgaggcagttttcagggtgcgctcactctgcgcatatgctattcacaaattcttccaggagagggattttgtgtacgtgcacacaccgcttatcacaggaagtgactgtgagggtgcaggagagatgttccaggtgaccacacttgatttgaacaatctccctatgacagaggaaggaaaggtggatttctcaaaggatttctttaataagcctaccaaccttactgtttcaggacagttaaacggcgagacatatgctatggcattcaagaatatctacaccttcggacctaccttccgtgcggagaattcaaacaccacacgtcacgcggcagagttctggatgattgagcctgagattgcttttgcagaccttgaggatgatatgatgcttgcagagagcatgctcaagtatgttatcagctatgtgcttgaaaatgcacctgaggagatggcatttttcaacaatttcgtggacaagggactccttgacagattaagaaatgttgttgaaaatgattttgcccgtgtgacatacacagaggctatcgacatcctttcaaagcacaatgacaagtttgattacaaggtatcatggggctgtgatttacagacagagcatgagagataccttacagagcagatttacaagcgccctgtatttgtcacagattatccgaaggagataaaggccttctacatgaagctgaatgacgacggaaagaccgttgcagcagttgactgtcttgtaccgggaatcggagaaatcatcggtggaagccagagagaggatgactacgataagcttcttgccagaataaatgagcttggactttcagaggatgactacaagttctaccttgacttaagaaaatacggctctgcaagacacgcaggctttggactgggctttgagagatgcgtaatgtatcttaccggcatgggcaatatccgtgacgttatcccattccctagaacagttaataactgtgagctgtaatcacgaatgaatttcatatatgaataattaccgccctttgcacatatatatgatgtgtggagggcgtttttatgtggagaaaaatcaaaggtcctgtgataacaatatgtattatgcatcttacggcgcttttgtgccttatcatactttccatagtacagtgctttgtcgacatggcggagtggataaagtttgcacttgccatggcggtcaatatagtggtggggcttgtgtgcggatttttgctcaaatgctgctttcaccgcagacgttttatcagggtgacggtcgtagcatactggataacgtatgtgatagcaacagtggtcatagatataggtgaatccaaaaatattttcgagcttttgataatacttcttctggtaatgttttcagcgcttgtttttcgctaaaaaaaggacttttcatattgataatgctgtgatataatgttgagagcaaatatgatgtgtcaatcagacatcgttaaatgaaaaggagataaaaatgaaacacgtaaagacattaaatacaagaaaattacagaacacagttaaaaagggcggatgtggcgagtgccagacatcatgccagtcagcttgcaagacatcttgtacagttggaaaccagacttgtgagcagtacaaatagtcataggtgaagcggatttaaagagtgtgcgctgataggtgcacactcttttcgcagtgtaattttaaaatgtgtatagaaagagaggaatattgtagtggttcatcagtacaagaacaacggctataatattgtcttagatgtcaacagtggcgcaatccatgtggtggatgatgtcacatatgacgttattgagctgtttgaggacaactcagctaaggagattattgaaaagcttgtggacaggtatccacagacggagatagaagaagcaatacaggaagtaaatgagcttaaggataatgaagagctcttcacagaagatacatacaaagagcgtatcatagatttcaagaagcgccagacagttgtaaaggcactttgccttcacattgcgcacgactgcaaccttgcctgcagatattgttttgcagaggagggcgagtatcacggcagacgagctctcatgagctacgagacaggaaaacaggcacttgatttcctgattgccaattcaggcagcagaagaaacttagaggtagacttctttggaggagagcctctcatgaactgggatgtggtgaagcagcttgtggcatatggaagagagcaggagaagcttcatgacaagcatttcaggttcacactcaccacaaacggtgtgctcttaaatgacgagattatggagttcgccaacaaagagatggataatgtagttcttagtatagacggacgcaaggaggttcatgaccgtatgagacctttcagaaagggtgccggcagttatgaccttattgttccgaaattccagaagtttgcagagagcagacatcaggacaagtactatgtgagaggtacatacacacatttcaatactgatttttcaaaggatgtgcttcatctggctgatttaggcttcaaacagatttcggttgagcctgtggtggcacagcctacagatgagtatgcacttaaggaatctgatttacctgtgctctttgatgagtacgacagacttgcagcagagatggtaaagagaaacaaggcaggaaacggcttcaatttcttccattttatgatagatttagagggaggaccttgtgtatataagcgtctttccggttgtggctcaggaactgagtacctggcagtgactccatggggagatttatatccatgccaccagtttgtgggcaatgaggacttccttatgggtaatgtctgggatggcatcaaggccactgacatccaggatgagtttaagtgctgtaatgtttatgccaaggaaaaatgtcgcaactgttttgccagattctattgcagcggtggctgtgccgccaactcatacaacttccacggcacaatcactgatgcctatgatttaggctgcgagctgcagaagaagcgtatagagtgcgctatcatgattaaggcagcagaggctgatatggcagatgatgcacaataatttgaatttgtcacgggaaacggatagcggtatttgtgacccgtgtgcgaatatatttgccatctgtatacctatatggatggtagcaaaatgacaggaaggtataagaaaatgaaaaaaggaaagagttgggtgattatccttgtggcagtcatttgtatcggcttgctgggctggtattccactgcagtaatcaccgacacaaagcaaaagcaggaggcaactgctaatggtgagagcaccaaggataaggattatcagaatatcaagcttggtctcgacctctcaggtggtgtttcaatcacctaccatatcaaggacaagaatccttcagacaaggatgtaaatgatactatcgcaaagctcgaggagcgtgcagagagctacacaacagagtactctgtatacaagagcggggatgaccgtatcactgtagagattccgggtgttgacgaccctaacaaggtactcgaggatcttggaagtccgggatcactgtacttcatcgcccagtatgacagtgacggaaatgccaactatacacaggacacatcggttgagggcggctacaagctcaactatgatattgacaccttaaaggccaatggctcagtcatcctcgatggtaacgatgtaaaggatgcaagcgcccagtatgaccagtcatcatctacatcaaccaaggagcctgttgtttcattaaagctcaaggataaggctattgacacatgggcagatgccacaaagaaggcaaaggatgcaggacagtcaatcggtatatactatgatgatcatttcatcagcgttcctacagtaagcgccgttatctcagatggtaactgtgtaatcaacggaatgaaggattatgacgaggcaacaagccttgcaacatttatccgtgtcggagccatcaacctccagctcgaggagttagagtcaaatgttgttggcgcacagctcggtggaacagcgctcacaaatgcagtaaaggctgcaattatcggaattatcttaatcatgatattcatgattgtgctctatggtatactcggtgtggttgcatctatcggacttgcactctactcaatgcttacagtactgtttatttactggtttgagattacacttacactgccgggtatcgcgggtatcatccttggtatcggtatggcagtagatgcaaacgttatcgtatttgcccgtatccgtgaggaaatcgcaggtggcaaatcagtgcttgctgcagtaaatgagggctacaagaaggctctttcagccatcctcgatggacaggttacaacctttatcgcagcacttgtgcttatggtgctcggttcaggtacagtaaagggctttgcatacacacttatgatttcaattattctgtcactgtttacagctctttttattgcaaaataccttacaagagcattttacggtgtcggtgtcagagctgagaagttctacggcaaggcaaagaagagaaaggttatcagatttgtacagaacagagttaaatactttgttatctcaggtgtagttatacttgcaggtatcggcggtatgatttatttcggtgctacaagcggcaatgcattaaactacagccttgagttcgtaggtggtacatcaaccacagcagactttggcaaggattatacagccgcagaggttgagaaggacatcgtgccttcagtatcaaagctccttggcaatagtgcagtgcaggttactacagtccagggcagccatgatgtcacattaaagacacgtacactttcactcgatgagagacaggatctcgcagctcttcttgagaaggatttcaatgttgatgcatcaactatagagactcagagtatcagctcaacaatcagtggagagatgagaacaaacgctgtaaaggcagttattatttcatgtattttcatgctgttatatatctggttcagattcaaggatatcagatttgcttcaagtgctatccttgcgctggtacatgatgtgcttgttgttgtcacagcatatgcacttatcagaatctcagtcggcagtacgtttatcgcatgtatacttacaatcgtaggttactcagtcaacgatacaatcgttatctttgaccgtatccgtgagaaccttcacggtatcaagaagtactcagcagatgagcttgctgatatagcaaacgagtcccttacacagacgctttcacgaagcatcaatacttcgcttactacatttgttatggtattgttactctttatctttggtcatacatcaatcagagagttctcattaccactcatggtaggtgtgctttgcggaacatattcttcaatctgcatcgctacagagctgtggtatgtgatgaagctttatctgggcaagagcgccattaaaaagcaggcggctgcaccggctaaggtttctaaaaaagctaagaattaataattaatttatggcccggcctttaaaggctgggctattgttttttgtggacttattaatatatgcagatatgtttatatatttataaatttatgtgcggagtaatagaatggagcattatttatatgaaaatttttctgatttatctgcttcttatgaatatagcaggctttgctgcgatgggaattgacaagtgtaaggccaaggcacacgcatggcgcatcccggagaagacattatttgggctcagcctgctgggcggaagcgccggtacctgggctgggatgtatgccttcaggcacaagacaaagcattggtattttgtaaaggggatgccgcttattttctttatccatgtggttattgcatgtgttatctacaggaatttctattagaaatttctattagaaatttaattatactaggtaacaaaatacttaatgtaggtaaaaagtaacaaaaaaatgtagcatataagtacataattgtgtataatagataacagataacaggtacaaaaccactacacaactatcaaggagggcaaaataatgtgggcatatgaaagtgtattttatcagatttatccgttaggcttctgtggagcaccatttgagaatgatggtgttttggagcacagaattttgaaagtgaatgactggatacctcatatcaaaaagcttggggcagatgcaatctatttttcaccggtgtttgaatctgatacacacggatataatacaagggattatacaaaaatagacacaaggcttggcacaaacgaggacttcgcacaggtttgtgacaatctgcacaaggacggcataaaggtagtgctggatggtgtgttcaatcatgtgggaagaggcttctgggcatttcaggatgtgcttaaaaacagagaaagctcaccatatgtaaactggtttgaccgtatagcgttcgatggcaattcaaactataatgatggattgtggtacgagggctgggaaggaaactatgatctggtcaagcttaatctgagaaatgaggatgtaatccagcatatcttttcagcgataaagggctgggtagacgagtttgatatagacgggctgagacttgatgtggcatactgcctcgaccatgatttcctcagaagactaagggagttctgcgactcactaaagccggatttcttcctggtgggagagacactgcatggtgactacaaccagattatgaatgatgcgatgcttcactcggtaacgaactatgagtgctataagggtctgtactcgagctttaattccatgaatatgtttgagataaatcattcgcttctcagacagttcggaccggagcagtggactctctacaagggtaagcacctcctgtcatttgtggacaatcatgatgtgacaagagtggcaagcatactgaccaatgaaaagcatctgccactaatctatgcacttgcatttggtatgccgggcatcccttgtgtgtactatggcagtgagtggggagagaaggcaaaaaaagaagacggtgacccggctctgagggcatgctttgaagcgccacagtacaatgaactgactgagtggatttcaaagctcgcagaggcaaagaaagagtcaaaggcactctgctacggtaatttctattcggttgtgctcacaaacggccagtgcgttttcggtcgtgaatgtgatggcgaaaaggtattcgtgtgcatcaatgccgcagaccagccgttttttgcgggctttgatatgggaaagggtgatgcaacagacctgattacaggtgagcaggttacattaaatggtggccttgagctgccaccttacagtgcatactttttgagataacatttgtatggacaataaaagaaataatagaagaaaaaatgaaagaaaagagctcatatgtgctgccacagccgtagtggtactttacacagctatggagtcgataggcatcacatgccccattaagtttatcaccggaatatcatgtgcaggctgtggcatgtcgagggcatggatggcatttttacaccttgatatagcaaaggcgtttgcataccatccgcttttttggcttgtgcctattgcggtaatagttcttttgtgtaaatctaaaataaatattaaaatttataaaataattatatttacaatcattattatgtttgctatagtttatatgtgcagattgatatggtcaggcgatgatgtcgtggtctttgagccggaaaacaatatcctgtttcgtatcatccgtataataaatagcaaataaaaaaggagaaagaagatgttttgcgagaaatgtggaaaagaaattcctgattcaacaaaattctgtccatactgtggagcacctgtttccaaggcacaggattttgtcaacaaagcaggagaggccttcaatgcagcagagcaggagcttggaagtgcatttgatgaggtaaagcagtccttcacaggaaatagtgcaaaccagcagaatgcaggtggacagtacaatggaggctaccagaacaacggagccggacagtacaacgcaggctaccagaataacggagccggacagtacaacgcaggctaccagaacaacggagccggacagtacaatacaggctaccagaacaatggtggtcagactcctccaccatacaggggagagaagttaaaggacgacagaggtcttgcctcatacatcatcctgtctattattacatgtggtatttatggatattatttcatctacaagatggctcatgatgtcaatatagcatgtgatggagatggcgagaatacatcaggtctcgtagcatttatcctgctttcaatgattacatgcggtatctatgcatggtactggtactataagctgggcaacagactggcaaataatgcaggcagatacggactttgcattcaggagaatggaaccactgttttgatgtggtgtatatttggtacacttatctgtggaatcggaccattcatcgctatgcacatccttatcaagaactcaaatatgatctgcaatgcttacaacaggacacatggacttatgtaatttgagttttgatttaatttaattaaataatttgattatattatttctaaggcgggaggcagtttgcattaagcagactgtctccttaaattttgtatattaaattaaacggtaaatattattgaaaaaggtcattcagacattgacaaaaatttgtcaaagtgttactatttttttataaattacgacagaaatgtcagttatacataggttttttaaggaggatttatacaatgagcgagttcaaaaatttaacacttgacgtagcagatcagattgcagtacttgcaatttcaagaccggctgctcttaatgcattaaacagtgagactcttgatgagttaaatgtagcattaacagagatagaggcaagagacgatgttaaggtgcttatccttacaggtggtcctgacaagaagggcaacgagttcaagtcattcgtagcaggagcagacatctcagagatggttaatttcacagcaccacaggcaagagcattcggaatcaaggcttcagagccattcttcaagctcatgaatatgcgtcaggtaacaatcgcagctgtcaatggattcgcactcggtggaggatgcgagatttctatggcatgtgatatcagaatcgcttctgagaacgcaattttcggacagcctgagacaggacttggaatcatccctggctttggcggtacacagagacttgctcgtttagtaggaatgggacgtgctaaggaaatgatcttcacatgcgacaatgtagacgctgcagaagcataccgcatcggtctcgttaataaggtagtagcaaaagaggagcttatgccaacagctaaggctatggctgcaaagatcatctctaagggaagctacgcaatctcagttgcaaaggctgctatcaacaacggatatgatatggatatcaagaacgctgttgagatggaagcaaacctctttggtgttgtaaatgatacaaacgacaagaaagagggaatgggagcattccttgagaagagagctgcaaacctcacagatttctaaataatgatttgaattatttattgtatatgaattaaaatagccggtgtgttaagcaccggctattttgtatgaatcagattagattattactctcacgataaacatagtatcagatacactgtactggcatttgccgccaagtctctcagcagactgtctgatgctttttgtaccaagcccatgccctctttctgttgcaacgggcatatcgtttatgagctaaggcattgtcgttttcattgttttcgatgaaggcagctatattattcagaaagtgcctcatatcgtgacgcagcagagaaacatttttaccccttaagtcattttgactttattatataatcttttttgtaaagcgtaaacaacagtcttgaaaaaagaatgaaacgtatctataattagagtactgttcacatggcagtgttaatatataattatagatttacaagaggaaaaaatgaagtcaagagcaacacagaccaaagaattggatatggtgaacggaccactcgcaaggaagatactgatttactccataccgctcatgttctcaaacctgcttcaggtatttttcaatatgacggatgtggcagtggtgggaaaatttgcaggtgcaagagcactcggctcggtcggttccacgacaatcatcatcacactcacaacaggcatattgcttggcatgggaggcggtgtcaatgctgtcacggcactgcacatgggagcagaggactatcagagggtgcataagaccgtccacacatcggtcattctgtgctttatagcgggacttttactgttagtggcaggcctggctttttcaaagccactgcttgaagtgatgaatacaaagcctgagcttatagacggtgctacagcatatctgatgatatatctgtgcggttcgccggcgcttgcgctttataatttcggcaacggtgtgctgagcgcagtgggagatacaaagagacctctcatatacctgagtatctcaggaattatcaatatagtgctcaacctgttctttgtaatagtatgcagactgggagtgataggagtagccatcgcaagcatcatagcacagtacatctcagcggcactcattatcaggtttctcatgaagacatacggcagctacggcctgcgcatgaaggatatagggattgacagggatgcggccgcagcagtgcttcgtatcggagtgccggctgcgatacagtactcgctctttgccatagccaatatatgtatccagacatccatcaactccttcagccatgtggtcgtggagggcaattcagccgccaccaatgcggattcgctcatctatgacatgatggcagcattttacactgcatgtaccagcttcatagcgcagaatctgggcgcgaggaaaaaggaaagggtgcttaggacatttttcatcaccctggcatactcgtttttgatgggactggtgcttggagtggcattgtttatattccaaagaccgttccttttgctctttacgagtgatgatgccgtgatacactatggacagatcagaatcggtgtgatggcattcgtctactgtgtatcagccttcatggacaatgccacagccgccgccaggggcatcggaaaaagtgtagcacctaccatcatagtggttatgggctctgtcgtattcaggattatatggctgctcacggtgtttgcgtattttaagacactgcagtccttatatctcatatacgtcatttcgtggacgctcaccgcaatcgccggcaatatatactttgcgtaccactataggagaatttagcggacagctacaataaaactgaatagtaagcgataaaaaacagtcagacatatgtgagagatgtgcccggctgtttttgcggtttcgcggctgtctctcttttataataggataataggaatttgcctgatatttttattgcccttttgcggttttaatgctacaatcaagccaaagcattatatttctgttgagcgacaccacagtacacatttttatcggtgcgtatcactttgaagagggtagaaccacttagtatttttcgacaaagacatggaaattttcaatgctttaagttacctatcaatagcagggaaaatggatatgtcgattgagaaacattatgtgaatgaagctgactggggttgttgatgctttatattgacaagaaattttgtatcatgcgatattctattcttcctgcttacacaactaaacaggaggagaataatgtcgggagagacaaaagaggtttttggcagtaattatggccagaacgatgtaatcatcaacggattgattgacaaaatgacgctgtttgatgacaatctgatgagtcttgtattcgggcagaatatcgagacaacggagttactgcttcgcgtaataatggagcgtgatattaaggttatagacgtccgggggcaggatgaattaaaaaatccagtgattggtgggagatgtattaccttggatgtgcatgcaatagatgtcgatggcagacatattgatatcgaggtgcagattaatgctgagggatcgcatgtcaaaagagccagatatcacagcagtatgatggatgcgaggatgctggaggaaggacaggagtttaaggagattaaggattcatacgtgatttttatttatgatcacgataagttcagaaaaggactgccattttatcacattcaaaggcgtgttgatgaaacgggtgaagcctttggagatggttcgcatattatctatgtaaatggaaggtatgaaggtaatgatgatataggtcggatgatgagagattttcatcagtgcaggccggagctgataaaaagtgagacattgtcaaaagcggtggcttattacaaagaaaaggaaggacgtggtgctatgagtgaagctgtaagaaagtacgcaatggaatatgcaaaagaatatgcaaaagagtatgcaaaagagtatggtgaggaacaaagaagagaaggtatgaaggctggaattaagactggcattgagactggaattgagactggcattcagaccggacgtcgtacagaaatattcttatcggttcaggatggggactattcggtgaacaggggagctgagaagcttggaatgtcagtggatgagtttgagaaatcaatgagtgaggcaggctacagagtgccggagttagtgtaacacgtatatatacaattaaaatcgaggaatgtttaattatggaaaattcaaacgaaaaagaagacatgagagcacttattatggtatttgtaatatggcttttgttatggtgtgttgataatagacagtatttttttgagtatctgccgcatcactcagattatgagatagtggcagcatataaagcttttaatggtgatatgcgtgataatataatcagggtatatgtaccggatagggataatgctatcggatatataaaggcagactacacagacaaagaggaaaagcctatatatgtaggatacagtaaggaaaggtcacctcacgttgtacgtaaaacaccggcgctttcaaaaggaatgattttagcgggaggaatcattccggcagcaatagtccaatatttttttagaaaaaagcataaatagtgtccttagacacgcaggaaatttagagacccttcaggattgtcagtgcccttctcaagcagcgagatgagctctgagatagtctgttcggtctcttcttttgtggacggaatcagtgtattgtcaagcttcacgacgagcacgagaagcacaatctctgcaagcgcatcaggctgttggcacacgataagtccctcagctgctccctgccttatgatttcaccggtcaccggctttagctcggtaatcaggtaattgatgtatttgttgtgcaaaaatgcattctcctgtacaccatttccggcatcggactggatttttaaaaaggcggcagaggagttgcggcatgcctgaaatatcatcgccatgcgcacaaacggagatatatcggtgcgctttgcaagctcctttgcggtggcaagcggctcttcgtagctttttgccataagtgcatcaaagatagcctcctttgatgaaaaataataatatatgctacccttgcctatcccggctgtctgggcgatttcgctgacagatatctgggatattttttttgtttctaaaagggttcttagcgcttcaagtatcttctcgtatttttccgaatttggtcttgtggaatgtggcatagtggctcctcttttattagttacgttcattttaatatatattatcacaatccatatgattcttccatgaaattttaccggggtaatagataatgatatgatacgtttggatagtttatgaaaaaataacagaatagtttgaaaacgaaaacatttatattgaccgccggtcgaaaaagtgatattgtaatgaagtaacaagttgaccggtggtcgaaaaggagaattgatatgacttatgcagatatgttttcaaaggtaaagggactgtttatggagtctgatgtgagcgatataagcgagcaccttgcttttcagttcaatataacaggagaggcagagggaattttttatgccgaggtaaaggatggtgtgttggcagtggagccgtatgagtattttgacagggatgcgatttttatatgcagcgcagagactctttttaagctggcagaaggaaggattgatccgattcttgcatttacaacaggcaagctcaaggtggagggaaatattgataaggcacttcgcctgaagcagattatagacagtaagaaggcgtaggtgatgaggatgaagtggggaataattgcaggtgttttaggtggtattgctgcagcagaggcaggcggcagtgcttatttctacaggaggaccatgatgcgctacaatgccaagaaggagcgcacgatgaagatgtcgggggttgactgggagagctattacagctttatgaagccgcacggagagtggatgagagcacagactcatgaggatgtgtggattaagtctgatgatggattaagactgcatgccacatattttcctgggatagatggaggtaatccggataaagccgtcatatgctttcacggctacacaagtgaagctatgtctgattacagcagcatatccaattactatttaaagaagggctatagcatgctgcttgtagatgcgagggcacatggacaaagcgagggtaaattcataggcttcggctgcaaggaccgctatgatgcgcttaagtggattgactggatgattaagaaggcaggcaatggcataaggattgttttgatgggaaattccatgggaggtgccactgtgcttatggcaagtggacttaatctgccggagcaggtgaagggaattgtgtcagactgtgcatttacctcgcctaaggcggtatttacacatgtgcttcacagcatgtaccatctgccggcttttccgatgattcagattgcagattttgtgaacagaaaaatggcagggtatgggcttgatgaatgcaatgctgcaaaagaggtgcaaaaggcgaagctgcctattttgtttatccatggtgataaggatacatttgtgccatgtagcatgtgtgatgagctttatgcaagctgcgcgtcacaaaagacaaagctgatagtaaagggtgcaggacactgcgagagctattacaagaatacgaaagctttcgaggacgcacttgataaatttttggaaggagttatgagatgatgaagacgagaaagggacacaacgtatatccgattacggttgcacaaaaatttcatttgtactatgcaaagtactgtccgaatatggcagtactcaatataggtacaagcctgacaatcggcacggagcttgactggaacgtgctaagggattcaatcaactacgcgtatgccagaaacgaggccatgcgtatccgctttacaagggataaggatggagagtgctatcagtatattgcggatgtggatgaggattttaaagagagaactgtcgatttcaaggattttacggatgtaaccatggaggaggcagagaatgagatgcaaggctggacacaggtgccgtttgagtttgaggactctcctatgaccaaaatcgtgatgataaagatgccggatggattcaatggagtttacttcttaggtcatcacatggtggttgatgcgcagtcacttattgcatttttaaaggatattattgagatatactgtaatgccatgtatgagggagtaccttttccaaaggatatgtgctcatatatcgagcagcttaaaaaggatctggcatatgaagccggaagtaaggcacagcttagggacagagagttctttgagaagcttatcagacagtcggagccaatctacaacggaatcgacggcacagcaaagcttgatgcggcaagagaactgatgcatgataacaagctaaggagtgcattcaatgcatcggatgatgtcacctcagcgcttgatatctttcatctggaggctgagccgacaaagcgtcttatggatttttgcgagaaatatcatatttcgcttgcttgtctgcttctcatgggaatcaggacgtttttccagaaggaaaacggcttcgatgatgtctccgtaaacaatgccatcgccagacgtgcgacacttaaggagaagaagtcaggcggcacacgtattcattcgtttccgtttaggacgtgcttttcaaaggatgtacgctttattgatgccgtgtataccatcagggataagcaaaacgagctgttccgccatgcaaactacaacccgacagagtactttgcactgcgctcaaagacctatccgcagccaaaggcagggcttacatatgagccgatgtcgcttacatatcagcctatgaccttaaaggaaaagggcttaaacgacctgggagatataaaatacaagactaagtggtacccgaacggcatgactacacaggctatgtatctaacggtaatgcaccgcccggaggacaacggactggatttcagcttcgagcatcaggtcaaggcagtctcaagaaagcagcttgagtatatgtactattacctgtgcaaaatcatgttcaagggagcagaaaaccctgagcttacaataggcgaaatcattaaattagtgtagtggattaggaaacgtattaggtaaaaggagattattatgtttgatgaattagtggaaattatctgtaattatgttgatgttcagccggcagatgtgcacgaagagtcacgttttatggaggatctgggcttcacgtcatttgacttcatgagcatgctcggggagatagaggatacctttgatgtggagattgagcagacaaaggctgcagaaatccgcacagtacaggaagcagtcgattatcttgagacattaaaagacgcataatgggtgaagataggaggaaatatgttatttcacacaattccggatattctttcatatgcaaatgaagcttacggcgcggatgacgcgataagatggaagaaatccaaaaatgagatagagtcaagaacctacagtgagcttaagaatgatacagacagctttgccaatgccatcgaaaagcttggcaaaaaagggcagcatatcgctgtaataggcccttcatcatatgagtggatagtatcatatctggcaatcacagaaagcggaagtgttgcggttccaatcgatgcatcgcttccggcagcggatatatgtgagcttttggacagagccagtgtgaggatgcttatatttgatgaggcacgttcggatgtggctgaggccgcagctaaaagctgtcatgatataaatgtgtatgtgtctatgaacagtacagagcattgtccacaggtgctttcgtttaaagggcttatagatgacaacaggggaagctacgagccggcagtggcagaggatgcgctttgcactatcatgtttacgtccggaaccacaggaaagagcaagggagtcatgctgacgcagaacaacctggctgaaaatgccacatgccttgacatgaaaattggacctcacacggtaattttgtctgtgcttccgatacaccatgcatactgtctgagcatggatattctgaaaggaatttcactgggttcggtaatctgcatcaatgattccatcatgcgcatggcaaaaaatatacagctttttactcccgacatgattcttatggtgcctcttatgattgagacatttgccagaaagctcgaggaggtaagggcagcaggacttcctgcagagccggtccgtaagaaaatgtttggagagaggcttcatacaatctgcagtggcggtgcgtacctaaatcctgattatgttgatttatttgcagagtttggtatcaccatattgcagggctatggcatgacggagtgttctccggtcataagcacaaatctaagctgggatatccgtaaaaactcggtaggcaagctgatgccaaactgtgaggcaaaaacagttgacggtgagctttttgtccgcggtacaagtgtgatgcagggctattataagatgccaaaggagactgaggagacactgtcggacggctggcttcacacgggtgacttaggctatgtggacgaggatggatatatttatctgaccggcagaagaaaaaatctgattatcaccaaaaacggtgagaatgtgtcaccggaggagcttgaaaacgctctgagcgtaaatcatctcataaaggaaatcatagtgcgtgagtctgaaggagtgattgaagctgagattttcccggacagagagtatgctcaaaatacaggcatcgccgatataaggccagctctgcaggcgcttatcgatgagtacaatgtaaatgtacctgcgtacaagcgtatctatagccttaaagtaagggagagtgagtttgaaaagacggcttcacgtaagataaagagaagctgatatataaagaggaagccgatgcatgtggcttgcatcggctatatatgaaaaagattagtatgagtattgcgtaattaatatgttttgttgcttttattttgtatctttcgtttatgatgttagtatacaaatcaattgtgaaaaccgtgtgttttgaatttcacttttctgtaaacaaaatatgaacaaactgtgcagtcctaaggtaccataaaaaatccttagacaatatcatgattttgtgtataattatagtatcggtatttgttattgcatataggatataattttatgcataatcaaacagcgatattattttttttacaaggggaaaaagatgaaattattaagttttgcaatcccatgttacaattcaaaggattacatggagcattgtatagagtctatcctgccgggtggagatgatgtggagataattattgttgatgacggttcaaaggatgagacagcagcgatagctgacagatatgcagccgaatatcctgacatagtaaaggctgtacaccaggagaacggtggacatggagaggctgtaaacacaggtctcaaaaatgccacaggcaaatatttcaaggtcgttgacagcgatgactgggtggatttggattcatacaagaagatactggacaagctaagggagtttgagcaggagaatacacagattgatatgcttcttgccaactatgtctacgagaaagagggagcaaagcgtaaaaaggttatgcgtcagaccggctttccgcgcaatgagatatttacctggagtgatataaagcatatttataaggggcattacatactgatgcattcggtaatatacaggacagagcttttgagaagctgtggactcaagctgccaaagcataccttttatgtggataatatctatgtatataagccgcttccgtatgtgcgtacgatgtactatctggatgtggacttctacagatattttatcggtcgcgatgaccagtcggtcaatgagcaggtgatgatacgccgtattgaccagcagattcgtgtaaataagattatgtttgacgatgtcaaattgcatgagataacaaatgagatgtgcaggaagtatatgtacagctatctggagattattacgactatttctactattctggcaattatctcaggcaccgatgagaacatggctaagaaggatgaactgtgggcatacatgaaggagcatgatgaagaaacctacaagaagctacgccatggcgtcatgggacagttaatgaacctgccgggcaagggaggcagaaaggtagctatcggtgcgtataagctgtcacagaaggttgttggattcaattagacggatgtgaaataaggagtattatatggatgaagtatataagcaaattgttaatatagcaaaaaaatataatacaaaaaaagtagtgctgtttggttcacgcgccagaggcacgaatcatcctaaaagtgatattgatctggctatttatggatgtgaggattttggtgatttatcggattgtcttaatgaggagttgtggtctttactaaagctggacataataaatatggatgataagcatatttcaccggtactggtgacagaaatagaaagggatgggagggtattgtatgaaaaagtttgaccagtatgtcagacacttgaggatattgtcaagggcatttgatgaagacttgacaaatgattttattgtgagcggtataattgataaatattatatacaatttgagctgggctggaaggtcttaaaggagctgttacgatatgagggtgctaatcaggctgcaacaggttctccaagagaaattataaaaactgcatatgcgtattatgattttatggatgagagtgtctggcttggaatgttaagagacaggaatgatacaactcatatatacaatgaggaagctgcacgtcagcttgtgaataaggtgcttgacaattatattcatgaatttcaggtgctggaaatgaaaattaaagaaagatattcagatgaagtattatcatcaattaattaaaaaagaccacagggcatcaaaacagatgaactgtggtcttttaacttgtaattagattactctccaagtgtgagcatggtatctatgcaggccttggcctttgttcttatatcgtcaggcagtatgatttcttctccgcctgctcccttaacacaattgtatacatccatcagggtagtgagcttcatattgtggcatacgcagtcttttgagagcggatagaagctcttttcagggcactcatactgtaagtgctgcagtatgctgttttcagttccgatgataaattccctgtctgtgctgtttttagcatagtcaatgatgccggtggtgcttccgatatagtcagcagcctttgaaacctcagcaaggcactccggatgtacgagaagctttgcagcaggatgagcctcttttgctctctcaacatctgctattgacatgcgcaggtgagtaggacagccaccatgtacaaatttgaaggtcttttccggaacctgttcctcaacccatgcgcccagattgcagtcagggatgaaaagaatcttgttattgtcaatatttttaacaatttttacagcggatgaggatgtgacgcacacatcgcatatggttttaagctctgatgtggtgtttatgtaggcaaccactgtatagtcagggttctcggtctttaacgattgtaagaactctacatcgagctgctccgccataggacagcctgctgcgctgtttgacaaaaatacatgcttgtcaggagataaaatcttgcatgtctcagccatgaagcggacaccgcacatgagcacattcttctgtggtgctgtggcagcctgcttgctgagtccatatgagtcgcctgtgaagtcggcaacctcaagtatctcgtgactctgataagcgtgagctaatatacagatatcattttccttctttaatcggataatctcatcctgtaattctcttgttgtcatcataatatgatatacctcttgaaattcctagtgtgattgaagcacagttatatcaatgtaagccccttttggattttacataaagaaccggccaaaataaataagttacttgtcattatacttagctgtaaaccagctgtcaacacaaaagttttacaggtgtcttgtcagttgtaaattttagtgttataatacgcccattacagtaaatcgcatccagggggatgttgctaaagaagcggctacatcggtggatgcaggtaaataaaagaggtaacatattatgaatacagatgtacttattgtgggaagcggctgctcaggtctttattgtgcgcttaagcttccaagagatgtaagaattacactgataacaaaatcagatctggagagcaatgattcatatctggcgcagggtggcatgtgcatgcttaaggagcagtccgatttcgacagtttttttgaggataccctaaaggccggccactacgagaatgacaaggagtcggttgagataatgataaacacatcacctgaggtggttgaggatctcgtttcatacggagcagattttgcgagaaatgatgacggctcacttgcctatacgagagagggagctcattcacacaacagaattattttccatgaagatgtgaccggaaaagagataacaagcacattgcttgcacaggttaagaagctttcaaatgtgacactcatggagtatacgacgatggttgacatcatcgaaagggataacaaatgctacggcgccatcatcagaaaacaggatggcacgctggaaaaggtgacagcggcatacactgtcatggcttgtggcggagttggaggactgtacagattttcaacaaatttcagacatctgacaggtgactcgcttgccattgcaaaaaagcatggcatagagcttaaaaacccggactatgtgcagattcacccaacgaccttttacacgaaaaagcatgaggacagaagctttctcatttcagagtccgtaagaggtgagggtgctaagcttttggacaagaatatgaacaggtttgtcgatgagctcttaccaagagacgtgctgaccggcaaaatccgtgagcagatgaaaaaggacggcacagacttcgtctgggaggatttgcgtaccattccaagggatgagcttgtatcacattttccaaatatcattgaacattgcaaggagatgggatatgatgtcttcaaggagcctattcctgttgttccggcacagcactatttcatgggcggcgtcaaggtgaatcaccacagccgcacatccatggaaagtctctatgcagttggagagaccgcttgcaacggagtgcacggaagaaaccgtcttgcaagcaattcactgcttgagagcctggtattcgcaaagcgtgcagcaggacagatggctgagcttgggtttgtaaatgatgagatagcagccaaaaaggccgcagatagcatcgacctcgcagactacagcgatgaaaaagctgtagagagagaatacaggaagctagccatggaggctatagagggccgcaccagcgtaggtatagaagagactatcgaatcaggcattgcctatattcaagcataaaaagtgcgaaaccgtaataaataagaataatttgaacgaaaggaatttaaatatatgtacgatcaggtaacactgggcctcaacgtagacccattcatattaagcgcattaaaggaggacatcacaagcgaggacgtatccacaaacagcgtgatgccacatccacaggcaggagaggtggatttaatctgcaaacaggacggaatcatctgtggactgcaggtttttgagagagttttcacactgcttgatgcagatacaaaggtagagttttacgtaaaggatggcgatagggtagaaaataagcagcttatcggtaaggtttacggagatatcagagtactcttgtgcggtgagagaactgcgctcaattatttacagcgcatgagtggaattgccacttataccagtcaggttgcagcgctcttagagggcacaggcatcaagcttttggataccagaaagacaactccaaacaatagaatttttgaaaaatactcggtcagagtcggtggtggaaacaaccacagatacaatctctcggatggagtgcttcttaaggataaccacatcggagcagctggcggtgtaaaagaggcaatcgccatggcaaaggcctatgctccgtttgtcagaaagattgaggttgaggtagagagctttgatatggtgaaggatgcggttgaagccggtgccgacattatcatgctcgacaacatgtcaacagagcttttaaagcagtgcatcgactacattgacggcagagccgaaatcgaggtttcgggaaatgttaccaaagaaaatattgcaagaataaagggtcttggtgtagactatgtatcaagtggtgcgatcacacattcagcgcctattatggatttatcacttaaaaatctacatgcagtatagattttagattgccggtcgcactatgctgtgacagtaatgttttacagaaaggaacgaaaatgaacggtgatgagagaagaaaaaaaataataaatattctatcctcgtcaaagtcgcctgtggcgggagttgcgcttgcaaaggagcttgatgtgagtcgtcaggtgattgtgcaggacatagcactgcttcgagcaaacggagccgcgattttttcgacaaacagaggatatctgatacaggcggataagcagtattcgagagtattaaaggtggttcacgaggatgatgaagtagaggaggagctttcaacaatagttgatgccggaggccatgtgaaggacgtatttgtataccacaaggtctacggagtgatccgcgccaatatggacatcaagtccagacgtgatgtcagaaattacttggaggaaatccgcacaggaaagtccagccttcttaaaaatgtaacttcaggttatcactatcacacaatatgtgcggagagtgaagaggtgcttgatgccatacaggaggagcttaagcagaagggcttccttgcaaagctgcaggactatgagccggtggatttctggggagacaacgaggatgaggcgaaggcttaattttatcataaagttaaagcgtaatataataattgcccgggcgaaagcccgggctgttttttgatttctatttaatttccagattttcacctgtaagccctatgtatgatccctcaggaagtccaccttcaggatgtccgatgagccatttgtttttagctgcaagaagagcatcttctccgccggtgtgtggatgttccagggcttcatttgtgccttttggaagtacaacggctaccagaaatccgccatcagatgcattacatggtgcgtagtgcagtgttgtggcataaagctcgactgctgttccggaaggaatcctgaaagcttccatcaaagaggtatcatatgtattttccacagagatatcctgctgtcggccgagtatcagtatggcatcagttgcggcaatattgacctcagagcatctgtgatactcaacagcattgagcttatgattgttgcctatgcaccagcctatctgtataggaagctccccgtatgttttctgttgtaattctgtagcgcattttagcttttcaagtgcagaaatggatggctcataaaccacatcagcaggaatttctactgtctgcattgtgctgaccagctctgtaagatctatagagtcgatcacctttccatatttcttaaaacattcttctgttatttcatgtatgatcattatatggtcctcctgatttttaaaattatagaaattataatgtatgacagagaaaatgtcagcaggataaattattgttttataccctagttattagatatatttattttaggatttgtaaaaatattttttatggaatataatgactattatgcaattttatagcagagactgaacaaaagaaaatagggagaaaacatggtatgaaaaaaagattggtttccgcagcgattacagtggcattgtttatcggacttatagccggtgttacttttaaatcgtcagataaaaaagaaataaagcattttacggcttttttttctgtagaaggagataatatagatccggataatgatataaagcagctcatagcagagcagattggtgctgaatgtgaggaaacctggcttgttggacaggataaggacgatgcaataaattctctcatagcaaccggggaatatccggattttgtattgggtgagactgcgctgtatgaggcagatgcactcattccaatagatgaatactgggacgattatccgaacataaaagaatatctcagtgatgaacaatgggaaaagttcagacagccggatggacacatatattggattccacagtttggagtatcacatggggatgatgtggagatgctgcataatggtgaagccttctggattcagacaagagtattaaaatgggctggatatccaaagattacaacgatagagcagtactttgacctgatagaaagctatgtacaggcaaatccaacaatgccggatggaacagaaaatataccatttacgatgctttgtgatgactggcggtatttttgccttgaaaatgtgccgcagtttcttgacggatttccaaacgatggaagctgtatggtagacacggaaaccaaaaaagtgatggattacaatgtgagcgacacagccaaaagatatttcggaaagcttaacgaagagttccataagggaataatggagcccggggcgtttaatgccacctatgatcaatatctggataagctgtcaacaggagctgtgcttgggatggtcgaccagtggtggcagttttattatgtaatagatcctgtattcaaaaaacagaatttggcacagcttgggtgtgattatgttcctcttcctgtcacgattgatgatggtattcacaacagatggcatacaaacaggatggcagaaatagattattcttcaggagtgtccattaccacctcctgtaaagatatcgaaggtgcgatgaagtttatcagtgatcttctggaacctgatatcataagagaaaggttctggggagaggagggcaaggactattcagtcgatgaaaacggtttgttttaccttaccaatgagcaggcagagaaaaaaaatgacagctcatataaggcagcgcatatgtgttcgtactcatactttccaagagtggagggaaggcttgatgatggtataaatgcgttttcaatggagtttcagcaggatgagtttttcaaaaatcagcctgttgatattcaggaatgttttaaagcctatggagtggaaaactatgtagatatgcttggaaaaaatgaggctcccggctcgtggtatccgatgtattcatattcagattcaattcctttgacctctgaatgtgggaaagtaaagaataatattgtggcagtaaagaaaatatggttgccgcaggttatcatggcagatgattttgatgctgcctgggagcaatatatggaggagtacaatgcctgcaatccacagatatattttgattatttacagcaaaaggtaaatgaaaattagcaatatttgaatactgtttggcaatttattaatagaataacaagcccctgttcgtttacacttgtatatatcaataaacgaatggggggattttattttggatgatttaaaaaatggtgctttgtatataggcacgataccatcatcaatggacaataacagatgctcggtcacacttgaggatgatggaagtgttactttttatatttatgcgccaaatgccaataaagtagaagtagccggaatgggaggctatttcagctcagaacgcatacagttaaagcctgatatgcagggtggattttcggcaaacattaaagatttccactgggcaatgcattattatttctggtatgtagatgatgtctgtataacaaatcctcatgcggctatatcatatggctgttttgctgcaataaacacatttgaagtgccaaaagagggcgaggatttctattttgtcagggatgtgccgcatggaacggtaagtctgtgcaaatatacctcacaggtaaacggtcacataaaggagagctatgtgtatactccacccggatatgagagcggagatggaaggtatcctgtattgtatttacagcatggtgttggggagaatgagaccggatgggtatggcagggtaagatgaatttcatcatggacaatctgatagcagacaaaaaatgtgtgccgatgatcatagttgcaagcagtggctacgcatttaaggataacgaataccctgtattttttccgggagattttgacagtgagcttgtaaatagcataatcccttatatagaggaaaattttaaggtaaaaaaaggaagaaacaatcgtgctgtggcaggactttcacttggttcaggacaggctacggatatagcggcaagacacccggagcttttttcagcagttggagtattttcaggtgttgcaatacatctcatgaaaaaaatcatcgacagcccatatcggtttgaagctgtctttatgtcggcaggagataaagaaaaagagatactgcttggaatcaatgagatggtaaaggaattttcactacaagggaaaaacagtacaccaaaagtatatgagggctatcatgaatggcatgtatggagaaagagctttaaggatttcgcacagatgctttttacatgggatgacgcagaacttgatgatattgataaagctgtcccggtcagatcaaagaatattgattttaccacaccggtacaggcggatgagagcatggtattttttgatccggtgtacaggcagatacagttcgaaaatgacgaggatggaaaaccggctggcaaatatccggatgtcatacatggtatccgtgtgacggaggataacagcattgaagtaaatctttttgcacctgatgcaaaaagcgtgagcgtagttcttgaaaatggcacggaggagcttctttacagatcaaagaaaaatgatggttattgggaaaaaacaataggcaatccggcagagggatttaactatgtgacatttatggtaaatggaacacctgtagtaaaccctgcggcacctgtcgggttcggatataacagggctgtaaactttgctgaggtacctgagaggaactttagctggcatgagcttaagaaaacagatcatggtcagatacatatccattattcgtgtgatggaaatggacaggtcaggatgaattatgtttatacaccagccggttatggggaggataactgtgacaccggcagagtatgtgtgcttgagtgtgctgcggacgaaagaaatttttgctggatacatcagggaaagatagcaaatatcatggataatctgtctggcgaaggcaggataaaaggaattatgataataatggcagacagctcgatatctgatgatatcatcgggaacataacagccatatacggaattaaggacagtgcacagaaagaatggttcaaaaaaggagataatgaatcctggacattatgcagacacagatttgtaaatttcatgtgcgggatacagtaaaacagcgacaaaaaggagagaaaaatggcaggagcatataagacaggcaaatacagaaatatattcaaagagtatgggtatccggaagaagaaattcaaaaaagagtagaggatacttttaacacgatattctatgggaatgatgatgaacgtttttatcatgaagccggtgatgatatgggatatatggaggataccggtaatcatgatgtgagaaccgagggaatgtcatatggcatgatggtatgtgtacagctggataaaaaagcagagtttgacagactgtggaaatgggtgcgcacatatatgtacatagaagatggtccggcaaaaaattattttgcgtggtcatgtcagacaaacggaaagcgaaatgccgatggaccggcacctgatggtgaagagtattttgcaatggcattgtttttcgcctctaaaagatggggagatggcgatggtatattctgctacagcaaagaggcacaaaatatcttaagggagtgtgtacacaagggggagccgggacacagcggagagccaatgtgggagccttccaacaagctgataaagtttgtcacaaatatggatttcagtgatccttcataccatctgccgcatttttatgaactttttgcccaaagggcttatgaggaggaccgggacttctggaaagaagcagcagctgccagcagagcatatctgcacagtgcatgccatgaaaagacaggacttagcgcagaatatgcagattatgacggaaagcctcatacggggcataaggaaatatttggaagacatgactggtattacagtgatgcataccgcacaatcgccaatatagcgatggatcatctgtggtttgatgcagatccgtggcagattaaaacggcagaaaggcttcagaagttttattgtgaggatcagaaggacaattgggatggtgtatttcttatagatggtacaccgcttgatgagaaggcacttcatccggtagcgatcattgctgttaatgcagaagcttcactcgcagcagatggaaaatatgcaaagcaatgtgttgaaaagttctggaacactccacttaggacaggtgacaggagatactatgacaatttcctttacatgtttgcaatgttagcactttcaggaaattacaggatttattgattttaatatacaagaaccttaagctggaatgatgaagcagtcataaactataaaagacaggacaaatatctataatttctcccggtgcaaagcaccgggagtttttgtatcatataatcattatagctgataaaatcgacacaacaaggaggcagcaagatggcaggtccaaaagcaccaaaggatccggaaagaaaaagaccgtatttctacatcatgaaggataaggatatatacggctcagtacaggaagatggaagcattatacattttatatatgaaagcgacggaagactgataaacagtgcacagatagccggaaatatagaaaataaagaggaactgggactgttagagacagtggaaggttttggcaggcttgtacacagcataggtgtatctgtggaaacagataatcaaaacgaacagatcgaatttgtgtttcagatgtacggaaagcaggacttgtacggaggcggtactaatcttaaggtaaagctgacaggcgatggaatggagagaaagatatacctgtcagattataagtggacaccggatgatgatataccgggacagataaagttcatatttaatacaccggatatcatgggaaaagcgagtgtcagactgtatctgaatgacggctatgaggctccggcagatattgaggaaacagaggtggatatgaactctgatgaatactgcaggatgataagccattcgcttatgaatatgggaaatgcataccgcataagaaaagccatcgaaaagacaagagccggaaaagaggtaacacttgcatacatcggtggatctatcacacagggagcaggtgcggtacctataaatacagagtgctacgcatacaaatcctatcagcttttccagaagcgtttttctgcaaagaataatgtgaaattcataaaagccggtgtgggcggcacaccatcggagctgggaatgatcagatttgacagggatgtactaagagacggacagcagccggatatagtagttattgaatttgctgtaaatgatgagggggatgagacaaagggtgactgctatgaaagccttgtacgtaaagtacttaatctgccatggaaaccggcagtcatattgcttttttcagtatttgcaaatgactggaaccttcaagaccgcctaagcccggttggaaagctctatgatctgcctatggtaagcgtgctggatgcggtttcccctcagtttgcattaaaaaatgacgagggaagggtaataaccaaaaatcagtttttctatgatatgtttcatccgggcaatgcaggccattccgtcatggcagactgcatagagtatctttttgaaaaaatagatcaggcagggcatgcaagtctggatgcatttgaactgggactgacagaggaaaaaatattgcaggaaaaactaaatcttgcaccggtaataggaaacagctttgaaaatataagactgctcgacaaaaaggatatatatgcaaaggcatatattgacgagggtggcttcgattcgacagatacacagctgcaaagcgttgagatggatgatcagctttcgctgactccggaattcccatataactggatgtatgatggcacaaaaaatacattaaacagggtaaaagcgtatttcgagcttgagatggagtgcagggcacttctccttgtatttaaggattcgggagaggtaaacgtgggaaaggcgaaggtatatgtggacggagaatatcattttacggctgatccacatatcaataactggcagcactgcaatgcggtaataatatttaacaataagaccagtgaaaatcatgttgtaagaattgaaattgcagaggaagacagagacaagcagtttacgatactgggctttggatatgtattatagagaatgagaggtaagagacatggtaacagcaaaaaatccaatactttcaggtttttatcctgatccatcaatatgtagagtcggggaagactattatctggtgacatcaagctttgtgtatgcaccgggtgttcccatatttcatagccgggatctggctcattgggagcagattggcaatatacttgacagaccatcgcagctatgcgtggaaaatgaagaaatatcgagaggtatttttgcaccgaccataagatatcatgaaggaactttttatatgataacgaccaatgtatcgcatggcggcaattttatagtgacagcgcaggatccggcaggaccgtggtctgatccgtattatttgggagaagaagcagtcggaatagacccaagccttttctttgatgatgacggcagatgttattactgtggcacacgcccaaaccctgaaggagtacgctacaatggagactgggagatatggatacaggagcttgatcttggaaccatgaagcttaagggcaggagcatggccatatggaaaggtgctgtaaagggctgtatatggccggaaggaccacatatctataagataaacggatattattatctgatgcatgcagagggcggcaccggaccggagcacagtataacgatagcaagaagcacggagctttttaaatggtttgaaggatgtccgagaaatccgatatttacacacagaaatctggggatggattatccggtcatctatgcaggacatggtgatctggtggatgatataaacggaaactggtatgtggtcatgcttgcgtcaagaccatgcaaaaagcacagcagcatgggcagggagacctttattgcaaaaacaatatgggaaaacgaatggccggtaatagcacccgggataggacaccttgaggatacggtagatataccgcttgaagagtgcagatttatagatgagatatcagaaaatgattttataactttctgcgaagccaagcctgataagaggctggttggaataggaaaacgcgacgagtctttttactcccttaaggaaaatccgggagtactgagactgtacacaaacaaagagcagatcgctgatcttggcacaagcgcatttcttggactaagacagaagggctatgagtttacggtaaagacagcagtgcgttttatcccacagtcggataatgagacggcaggacttgtacttttccagaacaatgagaatcatcttcgcgctgagataacaatggaagatggaaggctggtatttgtggtgactacacatattaagggaactgataaaaagatagcagtggcagatattatggagtacagcattacagaaaaaaatccactgtggaatatatgtatgatctgtaaggaacaggaagcatctatatggataggtacggccgaaaagagcgtaaaagtcgcagaaaaaataagtctgctgccatataccacagaagaagcaggtggctttgtgggctgtacggtcggtatgtatgcatcctcaaatggcagcaatagtgataactatgcagaattttcatacataatgctcacccgataaacattttgcggaattcagtcggggtgcatcccttttcagctttgaacacccttatgaaagtggatggatttgcaaagcctgactgcattgcagtctcggtgaccgatatattgggatcagccagaagggtaagggcaagttctattcttttctgatttaagtatttgtaaaaggtattattggtaaactgcttaaatagccgggtaaagtgatatttactgaatccggctattttggcgatttcatcaagtgttatgtcctcagtgcaatgtgtatcgatatactcacagatagacagaaaacgctccagatattcctgctgcttgtgtctgccgacattaaaattacaactgctggcagtatgatgtcttccaataaggacaagtacttcaagcattttggagtagatcacggcttctgatagaaatgagtcggtctggtattcatctgctatatcaagcagcagtttacggatattgctgtggatatcaccggaagtttccggggttagcgttatagcaggtgctataagggtaagtatggaattaaattcctttatttttgagacagcagaccactcaatctgcaggataagcctttttccggtgtcaggtgcgataagcctgtgtgttacaccggaagctataaagataatatcactctcattaagatgtaccaaatcatccccaatctgcactgtatagccgccttcaagtggcatgataatctccatgggagtatgccagtgaatgggataatcttctgcttccgcatttataaaaagctttacattgctgtattctttatattttactgtctcatgtattccattcagattttcgatcatatatacttgtctccatacggctgatatttatgcgcatttgcatgaatatagttattataacacaaatagcaatttttgaacattgtggggcaacaattagaaagaaaatactgcatgaatctggtaaaatcattatataaattaaaggagaagtcactatgagtaaaaaaactatagaatatgcaaaaaaactagtatcgcagatgacaatagatgagaagataagtcagatgctgtatgagtcaccggctatagaaagactggggataccagaatacaactggtggaatgaggctcttcatggagttgcaagagccggtgttgctacagtatttcctcaggcgataggtcttgcggcaacttttgatactgacctgatagaaaagataggagatgttgtatcaacagagggtcgtggaaagttcaatgaattttcaaaaaagggtgatcacggaatatacaagggacttaccttctgggcacctaatgtaaatatattcagagatccaagatggggcaggggacatgagacatacggggaagatccgtacctgacaggtaagcttggctgcgcatatataaggggattgcagggagatgatccggatcacttaaaatcggcagcctgtgcaaagcattttgcggtacacagcggtccggaagctataagacatgagtttgatgcgaaagcttcaaagcatgatatgtatgatacatatttgtatgccttcaagcgatgtgtaaaggatgcaaaggttgaggctgtcatgggggcttacaacagggtaaatggagaacctgcctgcggaagcaggacactgcttaaggatatactgcgtgacgagtttggatttgaaggtcatgtggtgtcagactgctgggcaatacttgatttccacgaacaccatcatgtgacggatacagttgaggaatcggctgctatggctgtaaacaacggctgtgacttaaactgtggaagtgcatttttacatcttaaggatgcttatgacaagggactggtttcagacgaggcgatcacggcagcagtagaaaggctgatggaggtgcgtatccgtctgggcatgatgaaggattatccatcgccatatgaggacatatcgtatgaggttgtagaatgtaaggagcatgtggagctttctgtggaggctgccagaagaagtcttgtacttttaaagaataaggacaatttcctgcctcttgacagaaaaaatgttaaaactattgcggttatcggaccaaatgccaactccagggatgcgcttataggaaattattatggtacctcatcaagatatatcactccacttgagggattacagcaatatcttggagaggatacaagagtgctttatgcagagggctgccatctttacaaggacaaagtacagggacttgcagaggaaaaggacagatttaaggaagccctcatcatggcagaacagtcagatgtggtcgtaatgtgtcttggacttgatgcaactatagaaggtgaagagggtgatgccggaaatgaatatgcaagcggtgacaagctggggcttatgcttccgggacttcaggaggaacttttagaggctgttgcagcagtaggaaagccggtaatacttgtgctgtcagcaggaagtgcgatagatctttcctgggcagaagagcatgtggatgcaattatagacagctggtatccgggagccagaggcggaaaggctgttgcagaagctatattcggagagtatagtccgagtggaaaactgccggttacattttatcagggcaccgaaaatctcccggagtttacggattattcaatggctcacaggacataccgctatacaaatgagaatgtgttatatccatttggatatggactgcattatggtgagacaaactatgatggactgtcagtggataaagcagaaagtgatgtaaacgaacctgtcgaggtgtttgtaaatgtgacaaatgacagcagatatactgtaaatgagatagttcagctctatatcaggcacgttgatgctgcagagtatgagccgggatatcagctaaaggggattgaggttgtaaagcttgagccacatgagactaagaaagtaaagctgactctttcgccaagggactttgctgtgatagaagaggatggaagctgtgtagctgtgccgggaatttatgagatatccgcaggaggacagcagcctgatgacagaagcacaaagctcacaggcaagcggacagagcgcattgaaatcacaagatgtggagagaaaacaggggtagattattaataataaatatgttattttataattaatgacaagtaaaacagactttaggagcggacatatgtcggctcctttaagtgatttcagaggaactgtttatgagaagatcaatatggaatgccattgagagaaagcttgatgattattcactcagaaaaaaattctacatattttatgtactgtgtgtcatgctgccgctcatagtgactgatgcagtggtgctttccatcgtaaataatgctgaaaaagaaagcagcagacatgaaatgtcgagcatagcaagtgctgtgggatataatctgagcagcatggtcaataacgcaggagaggcagctaagagtatctataccagcaagcgcatagatgattttatatcaaaggaatacacaagctctgctgagtatgtatcagagtatcagagcttctttcaggatacactttttgaaaacacacttggaatgagcaatatagtatttttcctgtatgctgacaatcctacaatagtaaatggcggaaaagtaaatgatatgtctgctgtaagaaatacggattcttacagactactggagcagaagggaagcggaggtctcttttttgcatatgaaaaaggcggagccggattgtcagatgaaagacgtatgatttatatgcaaaagctggatttttactcatctgatatcgaaaaggtactcaaggtagagtttaattatggcagcatgatgcgtactcttaagaatatgaattatgataatgaagtgcttatctgccatggagatgacatagtgctgtcaaatggggcttacagtggagtcaacaaaccatttaagacattggaggagattggaaaaataagcgactccgtatacaggcagcagatctctttgtatggctgtgatcttgatatatatgtgtttaagacacgcagtaatatatggagcatgcttatgcacaatgcaccgatcattgtttttctgatgcttataaatgtattctttccactttgtctggtcagtatctttaaccattcctttacgagcaggatattacggctttcaaaggtatttaagtcggttgacagcgaaaagcttgtatctatgactgacagggagagcaaagatgagattggcagcatgataaaaaattacaacaggatggtaagccgcacaaatgagctgatccagactgtatataagaataagataaaagaacaggagatgcttgtaagtcagaaaaatgcagagcttcttgcattgcacagccagataaatccgcactttctgtttaatgcgcttgagagcatacgaatgcacagcctgctgaaaagggaaaatgagacggctgatatggttgaaaaactcgcaatcatgcaaagacagtatgtggagtggggaaatgatgctgtaaccgttgcaaaggaatgtgaatttgtaaaagcctatctggcattgcagaaataccggtttggcgagcggctgaactataacatagatatagaagcagactgcatggaatgtcaggtgccaaaacttacgcttgtaacctttgttgaaaatgcctgtgtgcatggcatagaaagtaaagctgctccgggctggatatttgtgcgtatattcaaaaaagccgggttcatgcatatagaggttgaggatacaggcagcggaattgatccggatgctcttgaaaaaatgaaaagtaacatgaaaaatgcagatatcgatatgttaaaaaacggtggcagagtgggtgtgataaatgcctgcctgcgtatcaaaatggtaacggaatctaaagcagtatttgatgtggacagtgaggaaggttgcggtacgactgtgatgataaaaataccggaaacatatttataaggagatttaaaatgcttaaagtattattggtggatgatgagcctttcataatacaggggcttaaggtgatcattgattgggaaaatgaagaatttgagatagcaggaacggcctcaaatggaaaggaagccctgcagtttcttgaaaatgagaatgtggatctggtcatagccgatataaggatgccggagatgacaggacttgagctgcttgagactttgagaaaagataaaaaatcagatgtgtattttgtgatattaagcggttatgcagattttagctatgcgcagcatgctatgcagaatgattgtacggattacatactaaagccggtggacaaggagatgctgcttaaggtactaagcaaagttcttgtgcttaaaaacgagaaaaacaagatcgacgaggataacaaaaagatgaaacaggcataccttgcaggacacctgatatctctgatacggggcaaatatgatgaagtaaacctgaactatgtaaaagaaaatatgaggtgtgagggtggagcaaggtatgttgagatacagatggagcagcttccggcaggtgatgagatactcgatagtgatatgagaagcttacagcgcaagatgtacgaaagctgtgttgcttttctgggggctgattcggcacattgtgtatttgatgtatcggtaaatgaaaaagtgtatgacataggctttatattctcagattatatggcagaggaagccgcaaaaaacgagagaaaatatctggaggatctgagaaggtatatatgtgataatacacaaaagaatatagttatgctggtcggacgaaaagtatcagatatatcaaagatagccagatcatacggcaatgcatgtatgctcaggtcgtttcagggatttcgcatagtaaagagcatatattactatgaggatgaagtaaagatatcggcagatggaatagtgctttgtaaagatagtctggataagctgcttaggacagtggaacagaacaaccatgttgagataagaaatgcagttgccacattttatgatgagatgtccagcatgggtatgaatggggaaagcatgaacttaaatattaattatctgttgtttcagtttatacacctggcaagtgagcaggatgataatgtaaatcagcaggagattttgcgactcataagtgagagcagctttaagactggtattgagaggggaagccgtgcacatatgaccagattttgctgtgagtatggtgattatctgtcgcagcttagaaaaaatgtgtcaagaggtgtgatcggcatggtagaaaaggaagtaagagacaattatgccacgaacatcacgcttaagagcctaagtgagaagtattatgtaaacagtgcatacttagggcagcttttcagaaaaaaatacggacagtcctttaaggattatctgaacaattacaggatggaacgtgcggcagagcttctgcttaggactgataagaagataatacagatagcagaggaagtcggatatcatgatatggattattttgtgaacaggtttatacaggtaaaaggctgcacaccggcgcgtttcagacgccagatgcaaagtggagaataatatatattactgcaaaacagggtaaattatagttttttcgagaaactatagtttaccctgtttttgactatagttactccgattgtttgaaaacttaaaaagtataaaattaagttatcaaaagggaggacattacaatatgagaagaaaaaaaattgtaagcatgctgcttgtggctactatggcagcaacaatgtttgccggatgtggtaatgatagtggcaaaaaaggtagctccggaggtgtgaaagagtttgatgcattctttgctgtaccgggatctgaaatcaatgatgataatgaaatccagaagatcatcgaggaaaagacaggtgtaagggtaaaggaaacctggcttaccggacagacagcagatgaggcagtcggaacaatgatcgcaggtggcgagtatcctgatttcattgaaggtgcaagtggacagaagcagttatatgaagcaggtgcacttgttccactggatgactacatcgagaaatatccaaacatcaaaaatcttttcacagaacttgagtgggaaaaacttcgtcaggatgacggacatatctactggataccacagtttagctgcataaagggagacgagaaagtctgcacacacaatgacgaggcattctggatccaggcaagagtacttaaatgggctaactatccgcagatcaagacactggatcagtattttgacctcatcgagaaatataatgaagcaaatccaacaatgagtgatggaacagaaaatattccatatacaatcctttgtgaggattggagatatttctgtcttgagaatgcaccacagttccttgacggatatccaaacgatggatcatgtatggtagatcctgatacaaagaaaatacttgactataatacatctgatacagcagttaaatatttcaagaagctcaatgaagagtataataagggaattgtagatcctgagtcattcacacagacatatgatgaatatatctctaagctttctacaggacgtgtacttggaatgattgaccagtggtgggattttgcattcacagcaggtgatgcaattaaacaggcaggtcttgctgagcagggatgcgattacattccggtacctgtaacaatcgacggccgtgacaatcagtggcacaatgcaggcggtgctttcaacgaggcaacaggtcttgctgttacaacagcctgtgatgatgtagatgcggccatgaagtttgtaaatgatcttcttgatcaggatatccacaatctcagattctggggtgtcaagggtactgactatgaagtagatgaaaatggtgagttctacagaacagcagatgagagaaagcaggcttctgatacagcatacaaggcttctcatttatgctcatactcatacttcccacagtacaatggaacaagtgatgatggaatcaatgccaacaaacctgatggacaggcaagagagttctatgatggtcttaacagtgatgtacaagaagctttcgatgcctatggtgttaagacatacgttgaaatgcttggaacaaacgatgcacctggagattggtatccgatgtggtcatattctaacaactttaacacaagcactcctggtggagtagcctggacaaagattggcgaagttaagcatgagcagcttccacaggttgttatggcaaaaaactttgacaaagcatgggatacatacatggatgcatacaatgcatgcaatccacaggatttcctggatgaattacagactgagcttgataaaagattagagcaggctgctaagttcaaataaagcttaaatgaaatttaaggcaggcagatgtaatagcgttttatctgcctgctgccttttaaggagtggtgtcatgtcattaacgagagaaaacaaaaaagaaaaggtcagaaaacctagaacaaaaattacatggaaagaagtcaaacgccagaaagtgctgctgttctgggcagcaataatggtggcatatggagtcatattctattatctgccgctcgctggctgggcaatggcatttcaggattacaaaccaagacttggtatatttcattctgcatttgttggattggacaaattcaagatgctgttctcggatatgacatttatccgtgttataagaaatacactcgcaatgggcgttatcaatctggttgtaacttttgtcacagccatagcatttgcaatcttacttaatgagattgcatcaaagggtggaaagaaagtagtacagactatatcatatcttccacatttcctttcatggatcattgtaacaggtattttacacgatatgctttcaggaacaggtattgtaaatgagttccttgtaaatatgcatattatagaccaaccgataaactttttcgcacatacgggatatttctggccgatagtggcatttgccaatgtatggaaagaaacaggatggaatgcaatcatatatcttgcagccattacatcaatagatccttcactttacgaagcagcatctattgatggagcgggacgctgggcaaagatcaagtacgtaacactgccgggaatcaaaccaactatcataatccttcttcttatgaatgtaggtaatgttttaaatgcaggatttgagatacagtatctcttaggaaacggtctgatacagaaagtatcacagactattgatatttatgtacttaaatggggcataagccagggagattatgcaataggtactgcagcaggtatattcaagagtgtggtaagtataattcttatatttattgcaaataaaattgccaaacataatggtgaagagcagttgttttaaggaggtcttgtacgatggcagatataacagcaggctctgtaaagagcaaaaagaaaaagaagataagtatatttccaattgtaaattgcatcattatggtattgtttttgatcataacgctttatccggtgcttaatacacttgcgatatcgcttaatgatggtacagatgcattaagaggtggaatttacctcttaccaagaaagtttacctggaagaattatataacggttttacaaaaagataatcttataacaggagcatacattactgttgccagaacaataattggaacagtcttagcactggtagcaaatgcaatccttgcttttatagtcagcagaaaaagatttttgttcaaaagaggtttatccctgttttgggttatcacaatgtatgtcaatggtggattaatccctaccttcctcctgtacaagggacttgggcttaccaatagtttttgggtttatgtagtccctggaatggtcagtgcgtttaacatgctcgttatcaggacctatatgaatggaattcctgacagcttagaggaatcagcgcagcttgacggtgcaggatataccaccatttttctgaagatttattcacctctctgcaaaccggtatatgcgacagtagctttattcgtagcagtaggacagtggaactcatggtttgatgcaatgctttataaccgtatgaatacaaagcttactacattacagtatgagcttatgaagcttctttcagctgtaacaaatcagggaggatcagcagaaacattgaaaaatgctgtaggtgcagttacacctacctcagttcgtgccgcagcaacaattataacaatgcttccgatcatatgtatttacccgtttttacagaaatactttgttacaggacttacacttggtggagttaaagaataaatatttttttacaggatgcccggcaggataactgccgggtgtttttgtgtaaatgtttatttgaaaggagaattttcttcaaatcaggagcaaaatgagaaaaatggtacgttggcactaaatagtagtggattattataaaaaactgttgtataataaaactactttaaaaactcaaacaaaagaagggggattttatgaatagtcaacagtatagcagagccaacaaacgtgtattcctggcggtaatcatagtatttgcatatatagcatttacgttatttgcagcatttgggataaaagatgcagataccacaaggataattatacagcttgttgcggcaatagcagtaatggtaatatctatcattgcatttattacaaaaagagacagcagaaccggtgcacttatgatggtaagtgccatgacagccggatattttattatcgcactgttcaacttaacaatcggtacatggacgtatgccattccgcttgttattgcggcaatgatatatctggatatcaagatgatgatggtgatgaatgcagtaataatcatatccagcgtcatcaggcttgtaatgcagcttggaatagggggtacagctcttcagaatgatgtgatagcagtatttgtacttatacttgtgggatatgcgtcagatagtatcacgattcttcttactcatttctttgatgaaaatatggatgaaatcaaagagtcgtccatggcacaggtggacagcaataagaagatggtaatagttgcggagaatatttcaaagcactttgacgaggctatggccatgttaaatgatctcgatgaggcggttgcggtgagccatagttcaatccaggagatagcagacagcacagagagcaccgcggaggctatccagaagcaggcagctatgtgtgttgatattcagggaaatacagacaatgcagagagtggaatcaaggctatgatagatgcctcacgccagactgatgagaccgtaaagcagggagctgatgttgtggaagaactcaaggagcaggcacacaacgtggcagaggcaagcaatgttacagtgtcagttatccagagtcttacagccaaggtagaggatgtaaagagcttcgttgagtcgattatcaatatttcaaaccagaccaatttacttgcactcaatgcttcaattgaggctgccagagccggtgaggcgggaaaaggctttgcggtagttgccgatgaaatcagacagctatcagagcagacaaaggacgcatcagccaatattacagagattattaacaagctcaatgaggacacaaggcgtgccaatgagagcatagaaaactctgtatcatcggttgagaagcagaatgagcttatcgacgacacaagagacaagtttaatgcaatgggagaggccgttgagctgttgatgaaggatatcaatgtggctgaggagagtatcaaaaagattcttgattcaacaacagtcatatcagacaatatcacacacctttcagctaccggagaagaggtcgcagcttcttcaacagagggacttcgcatggctgataccacagttgagagtatggcaaagtgcaagaaagtgctggaaaatatctacatgcttgcagatgacctcaaaaactctgttgaggagagcgaggaagtacttggacagaaatatgatttccaggagcagtaaatatgattttcatattcatggcaggagtgcattagctcctgccatttttacatatatttttatgataaaaatatttacattatcgtaatatatgataaaatatttctaacacaatagaaacataaacataggatatatggaggaagttatggacgataacaattttatgaacaatgacaaccagtcatcaggcacaccggacaatacaggtgtattcgggcagtcttcagaaacagcaaatggctcagacacatacagccagccgcaggacacgtacaatcagccgacagacacatataatcagtctgtatcccagcaggaaagtgggaatgcatatgcatatggacagtcatcagaccagacaggcagcacagacggatatgtcaataatccgggcagtgcatatggttatgcaaatcagggtacatacaatcagaatccaaatgcccagggtacatacaaccagaatccaaatgcccagggcacatacaaccagaacacatatgctcagggctcatttaatcagtcagcttacggacagacgcagtatggccagcagccaaacggacagggtggctacaatcagactgcatacggacagacagcctacaatcagccacagtatggagctaatccatacaaccagccgccaaagaacagcaatggctttggtatagcttctctggtacttggaatcgcatctattgtactgttttgtacatgcatcaattatgtgacagctctgcttgctatcatttttggtattatacatatcataaagggcaacaacaaggtgtttggtatagttggtatagcaacagcagctatctcagttatagtcagcatcatattctgggttgtggcaggctcaaacgtaagcacagattttgaaaaggagttcatgaagggctttgatgagggctatgagtattataatgatgacgattcctatgaggattacgattatgattatgattcttatgattatgatgattttgattatcagaattttgattatgatggcatttattagagttaattattatcaaattattacagaatcaattacatcttgacaacagtggcttttcagttatatacttaaacacagttagtaaaaggcagtgacgaagacagtagagatggcaggaaagtcaaagagagccggggcaggtgagagccggtatgagtagagccgttttgaaaatcacttctgagccgcaggctaaaatcgccatacagtgttgcgagagtaggttctgacgtattccctacgttacaggggcgggtatgcaagggtatttcccttaagtacattgtaataggtggtatagacgtatcaggcacgcgttcctaattacaggaatgtgtgccttttttgtgaatattcaataaaccgaaaattctagtggagtaagccacaaggaagcctcgtaagagtcgaatttgaggtgcatgttgggatgttcacgaacaatatagaataaggagagatagtcatgtacaacaaagttgacaccaatatgaacttcgttgaacgcgagaagaagacagagcagttctggagagagaacaatatcttcagaaaatctatggaaaacagaaaagaaggagagacatacacattctatgatggacctcctacagcaaacggaaagcctcacatcggacatgttgagacacgtaccataaaggatatgattccaagattccagaccatgaagggcaaatatgtgccacgtaaagcaggctgggatacacacggacttcctgttgagattgaggtggagaagcttctcggccttgacggcaaggatcagattgagaactacggacttgagccattcatcaagaagtgtaaagagtctgtatggaaatacaagggtatgtgggaggatttctccaacacagtaggcttctgggctgatatggataatccatacgtcacatacgatgataatttcatcgagtcagagtggtgggctctcaaggaaatctggaacaagggacttctttacaagggcttcaagattgttccttactgtcctcgttgtggaacaccgctttctgcacaggaggtggcacagggctacaagacagtcaaagaaaaatcagcagtagtacgttttaaggtagtaggagaggatgcatatttcctcgcatggaccacaactccatggacacttccaagcaacgtggcactctgtgtgaaccctgatgacacatatgtaaaggtaaaggctgttgacggctacacatattatatggcagaggcacttgcagacaaggtgctctcgcagcttctttcaaaagaggacgcagaagcaggcaagaaggcatatgaggtgcttgagacatacaaaggaaaggatcttgagtacaaggagtacgagccgctttatgactgcgctaagcaggttgccgataagcagggcaagaaaggcttcttcgtgacatgtgacacatatgttactatgtcagacggtacaggaattgttcatatcgctcctgcatttggtgaggatgatgccaatgtcggaagaaattatgaccttccatttgtacagtttgtaaacgacaagggagagcttacagcagagactccgtttgccggtatgtgggtaaaggatgcagatcctgaggtattaaaggacttaagcggcagaaagcagctttttgatgctccgaaatttgagcatgagtatccacactgctggagatgtgacaagcctcttatctactatgcaagagagtcatggtacatcaaggagacagcagtaaaggatgatcttatcagaaacaacaatacagtaaactggattcctgagtctatcggttcaggacgtttcggaaactggcttgagaatatacaggactgggctatctcacgtaatcgttactggggtacaccgctcaatatctgggagtgtgaatgcggacacagagagtgtatcggaagccgtgcggagctcgctgaaaaagcaggagatccaaaggcagcagaggtagagcttcacagaccatacatcgacgctgtgacaatcaagtgtcctgagtgtggcaaggatatgcaccgtgtacctgaggtgcttgactgctggtttgattcaggagccatgccatttgcacagcaccactatccattcgagaacaaggatgtatttgagaagcagttcccggccaagtttatctcagaggcagttgaccagacacgtggatggttccattcacttatggctgagtctacactccttttcaataaggctccttatgagaatgtcatagtgcttggacatgtacaggatgagaacggacagaagatgtccaagtcaaagggcaacgcggtagatccgtttgacgcacttgagacatatggtgcagatgccatcagatggtatttctacacagcatcagctccatggattccaaagaagttctcaggaaagctcgtgcttgaaggacagcgtaagttcatgggaacactctggaacacatacgcattcttcgtgctttatgcaaatatcgataattttgacgctacaaaatacagcctggagtatgataagcttgcagtaatggataagtggattctttcaaagctcaactcagcagtggcaggagtggatgagtgcctgtcaaactacaagattccggaggcggcaaagtatcttcaggagttcgtagacgacttaagtaactggtatgtacgccgcagccgtgagcgtttctgggcaaagggcatggagcaggacaagataaacgcatacatgacactttacacagcacttgtcaccatatcaaaggcagcagctcctatgattcctttcatgacagaggatatctacagaaatcttgtctgctctatcgacaagagcgcaccggagtcaatccatctgtgcgactaccctgtagttgatgagaagctgattgacaaaaagctcgaggctgatatggacgaggtacttaaggttgtagtactcggacgtgcatgccgtaatgaggcaaatatcaaaaaccgtcagccaatcggtaaaatgtttgtaaaggctccggaaaagctggatgaattttatgtggatatcatcgcagacgagctcaatgtaaaagaggttgagttcactgatgatgtatcacactacaccacctacaaattcaagccacagcttagaacagtgggacctaagtatggtaaataccttggccagattaagtcagttctggctgagcttgatggtcataaggctatggaggagcttaatagcaccggctctctcaagcttgacagtattagcgatgaagttgtattatctaaagaggatttacttatcgagatgactcagatggagggatatgtgacacagtctgacaacaacatcacagttgtccttgacactaacctcactcctgagcttatcgaggaaggttttgtaagagaaatcatcagtaagatccagacaatgcgtaaggacgcaggctttgaggtcatggatcacatcgccgtgacatacgaggcagatgagaagctttcaaatgtatttgaaaagtttggtgatgaaatcaaaaccgaggttcttgccgtatcaattaaatcaggcgaacttaagggctatgaaaaggattggaagattaatggcgaggctgttaagcttgcagttgaaaaacaataatctctgcacgagagggagcattaatttgctcccttttagtgccataaggaggaaaaagatgagagataatacgtttagcaaaaaggtgtttattaagactgtatcagacaatttaaaaaataaatatcgtaagactatagatgatgccacacagcaggagctttatcaggctgtatcagaggctgtaaaggatgtcatcatggatgagtggattgccacacagagagtgatggacaaggatgatccaaaggttgtttactatatgtctatggagtttctgatgggaagagctctcggcaacaatcttataaacctctcagcatataaggaggttaaggaggctctcgatgaaatcggtgtggatatcaatgctatcgaggaccaggagccggacccggcacttggaaacggcggacttggaagactggcagcatgcttcatggattcacttgccacactcggatatcctgcatacggctgtggaatcagatacagatatggtatgttcaagcagcagatttcagacggcttccagatagaggtgcctgacaactggctcaaggacggatatccattcgagcttcgtcgtcctgagtactgctacgaggtcaagtttggtggatatgtgcaggagagcacagatgaaaacggagagcttcattttgagcagaaggactatcagtcggtgcttgcagtgccatatgatatgcctatagtcggatatgacaacaacgtggtcaattcacttatgatatgggatgccgagccaaagaacggcttttctctcgagtcctttgaccagggtgactacgacaaggcagtggagcaggagaatcttgcaagaaatcttgttgaggtactctatccaaacgacaaccatgtaaagggaaaggagcttcgcttaaagcagcagtatttctttgtctcagcgagcatccagcgtgcactcgcaaggtttaaaaagcatcacagcgatttaaaggatcttccgaataaggttgttttccaaatgaacgatacccaccctacggttgcagttgcagagcttatgcgaatccttgtggatgaggagcatctgccatgggatgatgcatgggatatcactacaagatgtgtagcctacaccaaccatacaatcatggctgaggcgcttgagaagtggccaattgagatattccagagactgcttccgcgtgtataccagattgttgacgagataaacagaagatttgtaattcagattaacgagaaatatccgagtaatgaggacaaggtaagaaagatggctatcctctatgacggacaggtcaagatggcaaatatggctatcgtagcaggctattctgtaaacggtgttgcaaagcttcacacagagatacttaagaatcaggagcttcatgatttctatgagatgttccctgagaagttcaataacaagacaaacggaatcacacagcgtagattcttagcacatgcaaacccgctacttgctgactgggcgacaaaaaaggtaggagcaggctggattacagacctttcactgctttcaaagctcaaggcttatgcggacagccctgttgcacagcaggagtttgctgagattaagagagcaaacaaggtgcgtttagcaaagtatatcaaggagcacaatggtattgatgtaaatccggattctatctttgatgtgcaggttaagagacttcacgagtacaagagacagctcatgaatatccttcatgtgatgtatctgtacaataagattaaggaaaatccgtctatggatttctatcctagaacattcatttttggagcaaaggcagcagctggctacagaaatgcaaagaaaacaatcaagctcatcaacagtgtggctgatgtcataaataacgatgcttctatcggcggcaagctcaaggtcgtatttattgaggattacaaggtatccaatgccgagattatttttgcggcagcagatgtcagcgagcagatttccacagcgagcaaggaggcatccggaacaggaaacatgaagttcatgctcaatggagcgctcactatcggaactatggatggtgccaatgtcgagatgttcgatgaggtaggagctgacaacatgtttatctttggaatgagctctgatgaggtcatctcacatgagaacagacatgactacaatcctgttgatgtatataatagcgatgcagagctcagaaaggtagtaaaccagctcgtagacggcacatattcgccaaatgaccatgagcttttcagggagctttacaactcactgctcaatccacagcagggacaggtggctgaccgctactttatcctcgcagacttccgctcatatgcaaatgcacagcagaagattaatgattattacaagaataagagcgcatggagaaagagtgcactgctcaatatcgcacatgtaggaaagttctcttcagacagaacaatccaggaatatgtggacgatatctggcatcttgacaggattaccgtaaatatggcaggagtataggattttggaaaaagttatcgcaaagacaggtatcagtggcagcacgcttaagctcatagccatttttaccatgctcatagaccatactgcggcaacggttattcttcagatgataaataacgggataggtggacaaacgcttattgatatctactgggtcatgcgttctatagggcgcatggcctttcctgttttctgcttcctgcttgtggagggcttcaaatatacacacagcagggaaaaatatgctgctaggctgtttatatttgcacttatctctgagataccgtttgatcttgcaataaacaatacagtgctcgaatttaagagcaacaatgtgttttttacactgcttttaggcttgcttgccatcatggtgcttgactggctaaagtcggtcgataaaatagaaaagtcatcctctgcagttaagtggttttttataacactgatcaggtgtatagtaatggtatcagtggtacttgttattatgattattgcagagtttgtgttttgctgcgattatggagcagcgggggtgggctgtattgtcatgatgtacctgctttctttaaaccgtgagattgcatttgcggtggcagtcatactgcttggacttttctcaggtaccatagagttttttgcactgtttatgcttatacctcttcgctattacaatggaaaaagaggtatttctcttaaatatgtgttttacgccttttatccggtgcatctttttgtactgtacctgatatgcaggcttactatggctgttaccggtaacacctaacagtgtgaccggcaacgattacagttcatttaaatgggggaatagatgaaaaagcttttaaaaacaatactggcacttgtgtttgccgcctgttgctttatgttcgctgcaaaatgcttaaaggcaggagggtttacaggtgctatagctgattttcctacagctatacacagggcagtaaaggggcagatgcagaccacaacagactatttaaacggcgaacagacagagtacgatgagtcagtatttacaggggaatatcactactactacgagaagctgtcagatgatgacaagcttatttacaggcagatttatgcgatgatgcaaaagcgcatggatggaatttcgttaaatactacagacactgacaacgttagccgtatacagcagtttgtgctgctggacaatccacagtttttctacatagaaaagagtcagtatattgtgagaaacagcatcattttttcacctgtatacaatatgtctgagtctgatatcgacaacgcaataagtacgatttcaggctatgtgtcagcctgtatggcaggtatcgatgaaggtgcatcggattatgacaaggcagtgcatttctatgaatatgtgatagagcatgccgagtatgaggaaaattctcctcacaaccaggatatgtactcagcagtgcttggaaggacggtctgtcagggctatgcgatgatgtttaagtatctgtgtgaccgggccggtatcagctcacttattgtgacaggcaccacatctgatgcaaaccacgcctggaatatggtatatctggacggtgcgtggtgtgcggtggactgtacctacggtgatggtgattatctgggaaatggcatatcatacagctggttcggagtgccgcttgatgtggtaaagcttacacgtacattggacaatgaggatatgctgccgcaggaagcgactgtggaggatgattattattacaggaatgggctgtattttacatcctacgaccttaaaacattacagggcatgacaacgtcatctaactatatcacgttcaagttttcggacagagaaacctatgatactgcatgtcacagtctttttgagaagggtgactacaaatatctcataccgacggcaagaggcggcactatcacatatatgcaggagcctaattcgcttgcggtgtttatacacatagagcttgggtgctgatacaaaaataaaagaaagaggaatccaaatgtcattttgtcatcttcacacccataccgagtacagtctgctcgatgggtcaaacaagataaaagaatatgtaaagcgcgttaaggagcttggcatgaactcggccgcaatcacagaccatggtaatatgtacggtgtggtggagttttacaagacggcaaaggcaaatgatatcaatccggtcataggctgcgaggtatatgtggcaccaaattcacgctttgacagggagacaagtcacggtgatgacaggtattatcatctgattctgcttgctgaaaataatacaggctatgccaatctcatgaagatagtgtcaataggcttcacagagggctattactacaggccgagagtggattttgagacgcttgagaggtaccacgaggggcttatatgcctgtctgcctgtctggcaggagaaatcccgagatacatcgtcagaggcttttatgacgaggcgaaggagattgcaaggaagtatcaggactgctttggaaaagacaacttcttcctggagctgcaggaccatggcattgatgaccagaagcttgtgaatcagcagcttcttaggatgagcaaggagcttggaatagggttagtgtgtactaatgatgtgcactacacctacgagtccgatgcggaggcacatgatgtgcttttgtgcatccagactgggaaaaaggtgtctgacgaggacaggatgcgctatgatggcggccagtttttcgtgaagagcgaagagcagatgagagcgcttttcccatatgccacagaggctattgagaatacacagaaaattgctgacagatgcaatgtaacgcttgagtttggcaattacaagattccaaagtatgaggtgcccgatggctatgacagcgccgaagccttcctcacagagctctgcgagaagggctttagggagaagtatataggctgtggcgagtatagtgatgaggagctaaaaaagatacatgccgatatggactatgagcttggtatcataaagaccatgggctttatagagtatattcttatcgtgtgggattatatcaactggtgccgcacgcacgactgctgggtaggcccgggacgaggctcagcggcgggaagcagggtgtgctactgtaccgggattacggatattgacccggttaaatacaatctgctctttgaaagatttcttaaccctgagcgagtttccatgcctgatatcgacgtggattttgaatacgcggagagatatcgcgccatagagtatgttcaggagaagtacggacacgattcggtaacgcagatagtcacctttggtacgatggcggcaagaggtgtcataaaatcagtcggaaaagcgctggatttcccatatgcagagactgacaggcttgcaaagatggtgcctcaggagctgaatatcacaattgacaaggcacttcagatgaaccctgaattcaagggcatttacgagagtgatgcaagagtgcatgaaatgatagatatggcaaaaaggctcgagggactgccaaaccatacttccgtgcatgcagcaggagtggtaatctatccgggtgtggcgagcgattatgtgcctcttggaagggcaaatgacggaagccctaccgcagagtacaatatggtacagctcgaggagcttggccttttaaagatggattttctggggcttcgtacacttacggtgctaaaggattccgtgaagaatatcaaggcatcaaggggcattgatgtggatatcgaccatattgatttcaacgataagggcacacttgactttatcggaacaggaaagacggaaggggtattccagctcgagtctgccggtatgcaaagcttcatgaaggagctcagtccacagagctttgaggacatcgtggcaggtatttcgctctaccgtccgggtcctatggatttcatcccaaactatataaagggcaagaacaatccaaatgagataagctatgtgacgccggagcttgagagtattttagagccgacctacggctgtatagtataccaggagcaggttatgcagatagtgcagaagctcgcgggctatacaatgggacaggcggacaacatccgccgtgccatgagcaagaagaagcagtatgtcatcgacgcagagcgccagagctttgtgtacggagataaggagcgtggcataaagggctgtgtggcaaacggcatagatgaaaaagccgcaaacagcatatacgattcgatggttgatttcgctaagtatgcgttcaacaaatcgcatgctgccgcatatgcgaaaatcagtgttcagactgcatggctcaaaaactactatccggtcgaatttatggcagcgctcatgacatctgttatagacaattcagccaaggcggcgcagtatctttacagctgtcgtgatatgggtattaaggtgcttccgccggatatcaactgtggacagggggagtttaccgcagagggcgaccatgtcagatatggtatgtatgccatcaaatcactcggcaggccggtcatagaccagataatcgaggagagagaaagtggcggcagattccgcacactctctgattttatcgagagaacctgccagaaggagcttatcaacaagcgtgcgattgagaatctgataaaggctggtgcctgtgattcactcgacggcacgagaaagcagatggcaatggtgtatgcatcgattgtggacagggtgcagcatgacaaaaagtcaactatggcagggcagatgagtctgtttgatctggtctcagacgaggacaggcagtcgtttgagcttaagtacccaaatgttggtgaatatgatgcagaggaggctcttgcatatgaaaaagaggtgcttggcatctatttaagcggacatcctctggaaaaatatgcagctgctctaaagaaaaacatcacagcaaatgcgatagattttgagctcgaagaggagagcggtgccgttaagataaaggacaatgcgcacgtggtaatcggaggcatgatagcaacaaagactattaagtttaccaggtacaatcaggctatggcttttatcacgatagaggatctgacaggaacagtcgaggttattatttttccaagagattacgagcgttatcagagatatttacaggatgatgctaaaatatttgttatcggacatgcgacagtcgaggatgagcagaacggcaagataatctgcgagaaaatcataccgtttgatgagcttccgaaacaactttggcttaagtttgatacgatggatgactataagaaaaatgagagcaggcttcttgagacaatccgtgaatcagacggagcagatgaggtcataatttacatcgcagatacaaagcagatgaagaaacttggcagaaattattccgtaaatgcaaataatgaactcatggagcagcttttggaatttttagacaaagaaaatgcgaaaattgttgaaaagaatattgaaaaattatgctaaaacaagtacaatagattgggattagaataaatgataattttttaacatatggaggttataccaatggcaaaagagattaacacaataggtgtacttacaagtggtggtgacgcaccgggaatgaacgcagcaattcgtgccgttgttcgtcaggctctctcaaagggcaagaaggttaaaggaatcaagagaggatacgcaggtctgttaaatgaagagatcgtggatatggattcaaagagcgtttcagacacaatctcacgcggtggtacaatcttacagacagccagatgtaaggagttcgttacagcagagggacagcagaagggtgctgagatctgcaagaagcatggtatcgatgctatcgtagttatcggtggtgacggatccttccagggtgcgcagaagcttgctgcacttggcatcaatacaatcggtcttcctggcacaattgaccttgatatcgcatgtactgattacacaatcggttttgatacagcctgcaacacagctatggaggctatcgacaaggtacgtgatacatctacatcacacgagagatgctcaatcatcgaggttatgggacgtggagccggatacattgcattatggtgcggtcttgcaaacggcgctgaggaagtattacttcctgagaagtatgacaacaaccttgaggcactcatcgagagagtagctcacgcaagagagctcggcaagcagcattacatcatcatcaatgctgagggtgtaggacattcacaggagatggctaaggaaatcgaggctgcaacaggcatcgagacacgtgcaactatccttggacatatgcaaagaggtggaagcccatcatgcaaggatcgtgtatacgctacaatcatgggcgctatggcagttgatttactctgcgagggcaagtcaaacagagttattgcccacaaggatggcaatttcgtagatttcgatatcgacgaggcacttgctatgaagaagagtgtagacgagtacatgtacgatatctctaaatctctggtttagtatctaatatagttacgataatatgaatgcccttgtatccggcacatcaaatgcaggtaattgcgtgcatgtgccggtgcaggggcatttatgcattcgtagaaatctgattaatcataaatgaggggcaaaatactttttgaccctcatatcatcaatatagaaagagaagaaaatgattacaagtgcatcaaacaaaagcataaaaaatgtgcaggctcttttaagcaaggcaaaggagcggaaaaagcagggcgtattcgtggttgagggtccaaagatgagctttgaggcgccatatgactgggtaagtgccgtatatatgtctgagtcattttttaatgatgacaggtttaaggaagagaagaagcgttttcttgacaaaacagaaatagtgagtgactcggtgtttaagaacatgtctgacacgcagactccgcagggcgtgcttgctgtagtaaagatgccgcactatgatatagatgacctgtttaagggggataagacagagcttcttgtgcttgagagcatacaggatccgggaaacttaggcactatggtccgtaccggtgagggcgcaggtgtaagcggcattataatgaatcgcacaacagtggacatttttaatccaaagactgtgcgctcaaccatgggctcactctaccgtgtgccgttttacatcacggatgaccttccggagactatagagtatgcaaagtcaaagggagtttatctctacgcagctcatttaaagggtaagtgctcttatgacagaccggactacaccggagcctgtggctttatgataggaaatgagggcaatggattatcagatgagatagctgacatggcggacacatatatccgcatccctatggagggagctgtggagtcgcttaatgccgcaatatcagccactttgctcatgtatgagtgcaaccgtcagagaagacttttgggagaataatatgcgtatttggtttaagatttatactgacacgcatctgatgcgtgatattacaatagaaaatgacagtgacgacacacgtacacacaagatttttaagtctcttgaggatgcctgccttgcatttgacctgggaaagcccatctggcttgacagcaatgtaagtgatttcaagaggcatggaaagactcgctttacgaaggataatttcgtggaggatatcgactttgattttctcgagatgcacatcatcgaggaggattgatacctcattatggatatgatgagttattattgatataaggacggtccgcacactgcaggcacagagcggcacacaagtactctctcgttcgctacgctacgccattaagaatctgtaggaattatgccttttgttttctatgcttgacgaaaccggcttttatgcgccgtccatggcgcataacgccttgccccggcgtccatgccggtgcatttctggttgtgaagcataattcaacagattctaaatagcttcgctatgcgcttacgagagagtacttgtgtgccgctctgtgcctgcagcgtgcggacctgtgcacataaaaataagcaacatataaaataacaagaataaaaaatatataaataataggtataatttgccaattatgcgaataaatatgctataatcgattaaaagagtctgataaatatacaggcgaatagatcacagggaggtttttaatggaacaagagtttgcggagggcattgatagctgggagactatgatgtttctatacaattctgcactgaaagaggtcaatacgaagctcgagatactaaatgacgagttcgttcacatacataattataatccgatagagtacataaagtcgcgtatcaagactcctgaaagcatagttaagaagctcaaaaagggcggctacgagagcactatagagaatatggtcacatatgtaaaggacatagcgggcatcagaatcgtgtgctcgttcacatctgatatatacaggcttgctgagatgattggcaggcagaatgatttgaccgtcatatcggtaaaggactatatgaagcatccgaaggcgagcggctacaagagctaccacatgattgtttcggtgcctatttttctttcaaacaaggtggttgacacaaaggttgagatacagattcgtacaatagctatggatttctgggcaagccttgagcacaagatatattacaagttcgagggcaatgctccggagtatatcagccgcgatctgcgcgagtgtgcaggtattgtaggacagcttgatgcaaagatgctttcgctcaatgaggcaatacttgaggccaaggagaagcaggagcaggagagggaggagaaaatacgagaagatgaacatcattaatgtcgaaaatataacaaagtcatatacgggaaggaagcttttttctaaagcttccttttatgtgcaggaaaacgaaaaaatcggtatcataggtataaatggtacaggaaagtctacacttttaaagattgtggctggtgatgaagagccggatgagggaactgtcaccacagcaaatcatatagtgataaactatctgccgcagaatccggagtttgacccggacgagacagctcttgagcatgtgatgagccgtgtggttacctcgcagctggatgaggacatgcgctggagtatagaaagtgatgcaaagtcacttcttatgaagcttgatatcacagatatgacgcaaaagaccggtgagctttcaggagggcagagaaagaggcttgcgcttgcaacagtcgtactcaagccgtgtgatgtgcttatattggacgagccgaccaaccacttagactacgagatggtggagtggcttgaggattatctgcgccgtttcaggggtgcaatcatcatgatcacgcatgaccgctattttctagacagtgtctgcaacagaatcgtggaggtggacaagggacagacctacagctatgatacaaactactcgggctttcttgagcttaaggcagccagagaggagagtgagagagcaagtgagcgtaagcgccagtctatccttagaaaagaaatagagtggatgcagcgcggcgcaagagctcgttccacaaagcagaaggcacacatccaaagatatgaggctctgcgagaccaaaaaggaccgcagacagacggaaaagttgagctttcatcggtttcatcgcgtatgggaaggacaaccatagagcttcatgatatttcaaaggcatacggagatatcgtctgtgtaaaggattttacgtatattttcctgaaaaatgaccgtatcggttttgtgggcaaaaacggctgcggaaagtccacactcatgaagataatcgccggttttatcgagcctgattcaggtgaggtagagataggacagacgataaagataggatatttcggtcaggaagtggatatagagcctgagcttcgtgtgatagattatgtgaaagaagctgccgagtttgtgcgcacggcggacggacttgtgtcagcatctgccatgcttgagaggtttttattcccgccggagcagcagtacagcccggtaggcaagctctcgggtggagaaaagagaagactctatctgcttcgtgtgctgatgagcgcaccgaatgtactgatacttgacgagccgaccaatgacctggatgttgagacgctggctattttagaggattatctggatggctatgacggaatagtcatcacggtatcacatgacaggtatttccttgacaggattgcaaagcgtatttttgcatttgagggagccggaaaaatcgtacagtatgagggcggatacaccgactatatgaataaacgcccacagcctgcatcaggaaaaaacgtatcagaaaatgcatcatccacaggagcatccgcttcaggagcacagggaaatactgcatcagatggtacagactcaaaagaagcccggaagaagaaatccatggaaacctgggggcatgagaaaaagctcaaatttacctacaaagagcaaaaagagtacgagacgatagaggctgacatagaaaagctggaaaacaggctttctgagatagatgatgagatggtaaagaatgccactaactttggtaagttaaacgaactcacaaaggaaaaggaagacctcgaggagcagctgatggagaaaatggagcgttgggagtatctcgaggatctggcgcagaaaattgcaaatttgacatagttcaagtaattcattttttcttaggcttcaacagattaaacaaactctgcggtatgccaaacccgaatatgataccgagcacgatggcacccgccacctcaaaggtttcaataccctttgaggaggaaagtgccctgtcgttagtaaaaagataatatgccgtgtaaaaaattcctgctccgggcacaagaggaaagataccggaaagcagataaactgtcacaggcatagagcgtgccgcagcaaaaatgcgtgccattatcgtaaggcacagtgtcgcgataagcgatggaaacacaacacccatatcaaactgaaccattatatagtagatgatccagccaagcgctcctgtaaaaccgcagtaaaacagctctttctttggagcagaaaaaataactgcaaacgataatgtggcaaagagagccacaataaattgtattataaactccatagcttaaagccctccaatatatttcatcacaacaaacggcagacatgctcccacagcaacacacacggctgtaatcagtgcatcgagcagatgtatcgtaccggacagataatcaccattatagatatccctgatagatgttgtaaatgctattcccggaacgagcggcatgatagctcctataatgattttatcaggtaaaagagaaagccctgtaagtgtacttgcggtggcaagcagtgtcacaaaaagactggcaaggatattggttataatccttgtgaacttatattttttaaggccaaacaaaagcacctgctccagtgagccgataacaaatgcaaaaacaaagtcaagccagcttccgccaaaaagatagcaaaagcaggcacttccgagcccgcagaagaaaatctgtgcgctttttttgtaattaggaatatttttgcactgctcaagcctgtcccatgagtcaatcagggagattttctggtcacatatgtcccttgcgagctggtttaacgcgctgatctttgccagattgacagcaccaagcggtacgtggcgcacgatgctgcaggcatcctccttgttctcatttgcacttgcaaatattccgtttgacagcacatatacgtcaaattcatccacctcatatgaacttagtatatgaacaacagtgtcctccactctgtagatttctgcaccgtttctgagcatacagtcgccaatttccacggcgagagtcagtatttccttagtgtatgccatttgttacctcactttataaattgataatagtatacaataaatatgaattattacgatattttacaggccaaataagtcactatgtgtacctgtgcgtgcaagtgttagtactaaaacttcgttgtcaaaatagtacacaagcagccaatcaggttgtatatggcattctctgtgaccactccagttgccggagagaggatggtctttatatttagtatcaaggatttctccatttgcaatttttgaaacaatatcttttaaaagagtgatatcaagaccacgacgttttgctagtttataatcttttttaaattgtgttgtgtatttgatttcatatttactcatgcatcaaggtctgcaaaaagttcatccacatttttataaccatcaatagttgagtcttttgcaatcctttctgcctcaagcatagctgaaactgtctctttgtttggagaaccttctgttattttaaatgggatacctcgttctcgtaaagattgacgaacaaaaatgttgaatgcagtgctgatattcatacctaattcttcatataaagcttcagcagcagcttttaaattgctatccatgcgaatgctgatattacttgttgttgttttagccatgataaagttcctcccttagattatttatatttattatatgatgtttgcacgaaaaaaacaatatatcgcacgaaaaatattgatttatattgatttaaatacgtgcgtgtattttatgtataaaatcaaaataaatggaaattatatacatatgaatattaatcgaagggagcatgaaaatgccggagcatactgatacctcaaaagaaaaaatccttgtgtatatacgcgccgagcagcagaaaacacttcaccgcaggcaggtctgcatcaatgacatagcaagtgtgtattgtaaatattcacgctatgagggacagataaagggaatgatcgtggataagatacgcggtaaaaagagcgtgatatctgtaatgaaaataatagagcaaatcacggagctttatgatgatgcacaggttataagtatcggtgagccggaggtgcttgtagagtatgacgataacagcaaaaataagattcttgaagcactaaaggttgcagcggtgtgtatacttatattttttggttcagcttttacaatcatggctttcaataatgatatttcgatatcaggtgtgtttgagcatttttataagcagataatgggtgtggacaagccacaggtgtcggtgcttgaggtgttttactgcattggtctggcggttggaatcatactgttttttaatcatatcggaaagcgtaagctatccgacgatgtcacaccgattcaagtggagatggataagcataataaggatacgtggaacacaataatagacaaggtaaaggaaaagcaggatgtttgaatatatattgcgtgaaatatttttgtcagtgatagcgtttttagcaggggcaggagtgtcagccggtgtatttgcatttgtgctcgtgataggagtggtgccgcgtatacttcggtgcagcaggatagaaaatataatacttatagaaaatgtcatgatatgtggtgtggtggcaggtaatatatcgtcagtgctagatacggcatataatctgggctttgcaaatatgccaaaagtacctgtaagcaatatctgtgggaatataattattgcaatatatggactgtgtgtcggcatatttgtcggctgtattgcagtggcgctcgcagaaatactgcatacattccctattatatataagcgcatgaagcttcgcgccggtcttgggattatagtgatttctatggctattggaaaggcactgggagcactttattatttcctgacgggatttgttgccacttcataggactctcttaagttatctttagctatatcatgttatactcttgaaacaaaaagcaaatagggtataatggaaataacttggacttagaggtattccagctaactcggaaaggaataatatgattacatcaatagccagacaaagcatcatactcaaatgcttacgccaaaaatcagtgcttgtaagtaactacgagctgtattataccgcaggtcttgcgaagaagtgctttggaatcgaagtcgatgccgacatggagccaaagcagcttcttgaggaattgcaaaaacacattgataaggtatcgccggcagatgagcaggagaagtatctcatacatcttcttggcaactatgagcctgatgatacccatgatgaacagaccaaagagctgtttcacatgggagagaccgaggagcatatgtggcaggtctcaattacataacagcatcctttggagaagaaataaagacatgggaagagaattaccagcagtctaaatgccgccgtagagcttgctctgcggcggcattttcgtattccaggtcatatttgaagcagtacagagaccgtctggtatctctaacccatagtgacctcaactgtaatatcatgtccggttccgttaatagctggaatcatgtttccatccatagtagcgccatccacgatgagcctagtcacacccttttgtacgtgagcaggatttctgaccgtaatgtggtaagtattgccacggaacttgcgcttagctgtaaagccgtccatagtgtcaggaatacaaggatctatgatgagaccatcatagtcaggacggataccgaggatgtactgtgagacatccaggaaggtccatgcagcagtacctgtcagccagctgttctttgcctcaccaaagttaggagcgtcttttccggcaatcatctggctgtatacataaggctcggtgcggtgaatctcactgatatcctcaatgtatgcaggacaggttcgtgtgtatacctgccatgctctgtttccacggccgataatagtctctgctatagaaatccaaggattgttatggcagaagatgccggcattctccttgtatcccggtggataagaagagatttcaccaagctccacatgatatctgtggtaaggtggttgtaagagcacgataccatatttggtatcaagatatttctcaacagactgcattgccttaaggcagagtccttcatcctttccaatttcagcgataacacaaaagccctgtggctcaataaagatttttccatcctcacattccttggaaccgatcttgtgcttgtagtggtcgtatgcacgaagataccattcaccatcccatccggcatctatgacggttttttccatctgttcgatagccttttgggctttggcggcctcgtcgcaaagtcccttatgtctgcagatttccacatagtcttttccgtactttacaaacatgccggcgataaatacagactcggcattaggcccttcagacggtccgaaggtctggaaggattcgcccggctcctcggagaagcagtttaggttcagacaatcattccagtcagcacgtcctatctgtggcagtccgtgaggcccgagatgattgattgtatagttgaaggagcggcgcagatgctccataaaatcagtagcctttgaaggatcgctgtcatatggtgtagactcgtcaagaatagagtagtcgcctgtctccttgatgtaagcagcggcagcagcgataagccacagagggtcatcattgaagcctgagcctatgtcggcattgccctttttggtgagcggctggtactgatgataagcagagccgtcctcaaactgtgtggcagcgatgtcgagtattctctccctggctctgtcaggaatcagatgcacgaagcccagcagatcctgacaggaatccctaaagcccatgcctcgtccgatgcctgattcaaaataagaagcagaacggctcatgttaaatgtcaccatgcactgatactgatgccatacatttaccatacgatcgagcttttcctccgatgaagatatggtaaagtggccaagcagcttatcccagtaagccttaagctctgctaaagcagcatcggctttttcagtggtatcgaatctggcaaggagggcgtctgcaggagcgcggtttatgattccatcctcagcgcgtccgacccatttttcatttacagggttttccacatatcccagtacaaaaatatatgtttttttttcgcccggctcaagagctatttttaggtggtgggagccgacaggagaccagccgcttgcaacagagttctttgactggtcatttactacaactgaaggagcactgttttcaccgtaggcacctaagaacgaatccctgtctgtgtcaaatccgtccacagaggcatttacagcatatacagcatagtgattgcggcgctctctgtattccgtcttgtggaagagctgagagccaccggcgtgaatctcaacctctccggtagagaagttacgctggaagttggtcatgtcatccatggcattccacagacaaaactctacatatgagaaaaccgaaaagtctttcttcttatcagatgtatttttcagggtgagcttattgatctcgcaggtagagcccatgggaacgaaatcagtaagctgtgccattaagccgttttttactcctgtgaaaacagaatagcccatgccatgacggcattcatatgagtcaagctcggtcttggaaggcatccagccgggattccatatggtgtcgccatcctttatatagtagtagtgtccgttgctgtcgtacggcacgttgttgtagcggtatctggtgaggcgcaggagctttgcatccttatagaagctgtagccaccgcaggtatttgataccagagaaaagaaattctcacatccaaggtagttgatccatggtaacggggtccttggagaggtgatgacgtactctttgttttgatcatcgaagtgtccaaatttcatatatgtaatctcctttttataaaatacgcgtaaacgtttaagtagcttatatatagaagtatatattggaaaaattaaaaaatcaagcgcaaaacaacaaaaaacagtggttttatgacatatatacaaagggtgatgcataattatagtaaaaaatgctgatgaaataatattacttgagcaacaatgaatgcatataataagatgagaagcgtaaacgtttaaaaatacaatatatgattatatataatgcacaatattatgagattaaaaatgtgaaaaatattcaaaatgtaaattagggggttgcaaaatcaacaacttgtggtatagtaaagatacgaaaacgattaagcaaccaattcgaaatgaggaaacgatatggtatcactgaaagacatagcacaaagatgtggtgtttcgacagcgacggtcagcaaggcattacatgaccagaaggatattggcgctgagaccaaaaacagaataaagaagatagctaaggaaatgggatatcttcctaatgctgcggccagagttcttaagacaaacgagtcgaacaatatcggagtactgtatttcgatgaggcggcgatgggacttacgcatgagtattttgccggagtgctaaacggaatcaaggcacaggctgagatgcttggatatgatattacatttatcaatacaagtccggtcggaaaaaaattatcatacctggagcactgtaagtacagaaatttcgatggagtcgtaatcgtatgtgccaggtttcaggacaatgaggtgcaggaactgatgagcagcgacataccggtggtcacaattgactacgtacactatagctgttcggcaatatgttccaacaatgtaaagtgtatgggcgagctgcttgattacataataggcatgggacataagaaaatcgcttacatacatggacaggatttttcgagtgttacacgcgacaggctggcagcatattacagggcacttgagaagcatggaatagatattcctgaggagtatgtcagggaagcaaggtatctggaagcagaggatgttgcaaagcagacagaatatttacttgatttacctgacaaacctacatgtatcatctatccggatgacacggcggcaatcggaggcataaatgttataagaagcagagggcttaggattccggaggatatatcaatagcaggatacgatggtacaagagtttcacagatgctaagcccgaagcttaccactatcagacaggacactgacaagataggcagggaggcggcagacaggttgataagcatcattaaaaagcctaaaacagcacttgtggagagagctgttgttgaaggaattttgctggagggggagtccgtaggcagaatttaatatattttactacttttttactaacatttactaacaggtttcaacctgaagcgagaaggaggattttctatgaaaaagaagctcgtaagcgcattactttgcgcaacaatggcaacatcattactggcaggctgtggcagcggagatacatccgacacaggaaagtctgataagaatggaggcacaaaaacagaagcgacaaacgatggcaagacactcaacatctattgctggaatgatgaattccagagccgtatcactgaccactattctgattacaagaaggtggatgcaacacatggcaaaatcggagatatcgatgtagtctggaacattacacctaatgagaacaatgcataccagaacaacctggatgagacacttttgaagcaggctgatgcatcggcagatgacaagattgatctcttcctggtagaggctgattacgcaccaaagtatgtagactctgattacacaatgtcaatcaaggatctgggaattacagacagtgatatctctaagcagtacaagtacacacaggatgttgttactgattctgatggcaacctgaagggtctttcatggcagggctgcccgggtgttctcttctacaacagagcagcagcaaaagaggtacttggaacagatgatccggatgaggttcagaagtcagtatctgactgggataccttcaatgctacagctgagaagatgaaagcagcaggctacaagatgacatctacagcaaacgatacataccgtgtatactctaacaacgtttcaaagaaatgggtcagcgatgacaagaagatccagattgatgacaatatcatgaagtgggttgatgattctaagaagcttgtagacgcaggcgagacaggaacagcagacctttggtcagatgactggaagaagggcttctatcctgaaggaaaagtattctcatactttggacctgcatggttagtaaacttctcaatggcagcagatgagtcaggttctatcggaaaccagggcggctggggtgcagctcagggaccacagggcttcttctggggcggtacatggatctgtgcagcagaaggaacagacaatgctgaccttgtaaaggacatcatgctcaagatgacaacagacgatgatatcatgaaggatatcgttgtaaaggatgacgatttcgtaaacaacagcacagttatggatggtcttgcagacggaacaatcatgggcaaggacgacaagccttacacaagtacagtacttggcggacagaatccattaccaatgtatatagccggtgttaagactctcgacttaagcaacctttcagcatatgaccagggctgcaacgaggagttccagaaggctatgaaggattacttcgaaggaaactgctctaaggatgaggctattgaaaccttcaagaaggcagttcgcgagaaatatcctgacctcacagaataaggtagttacgatagtttatgaattgaccatacaactaacaatataaaataataaataccctgtctgccttgcgttagcaggcaggcggggtatttttttaaaatcaaagctaatcagctaacagcattacatcaccattgactacaataccagttgggaggtaggtattatgaaaaagagtggaggtaaagcggtcagatataacaaatggggctatatctttctgattccgtttatcgttgtatacgtagtatttcagctggtaccgttaatcactacaatttacaacagcttttttgaaaattatatgtcaggtcttacacaaataggaccaaattttgttggatttgaaaattatgaaaaattgttcacatccggtgatatctggcagtattttaagaacacaatggttctttggattatgtgcttcataccgcagatattcttatcactgctccttggagcatggttttcggatgtcagcttaaagctcaagggaacaagattttttaaaacagttatatatctgccgaatctgattatggcttcagcattttcactgttattctttacattgtttgctgatgggggaccgataaacaatctgcttatgcagataggttttatttcagagccatacaagttcctgtcacatgtgggcagtacaagaggactcattgctttgatgaactgtctgatgtggtttggtaatacaaccatcctgcttatggcaggtatgcttggaatcgatacatcgctttttgaggcggcagaggtggatggagcaacatccacacaggtgttctttaagataacacttccgctccttaggccgatactgatatatgtaatcattacatcacttatcggcggcttgcagctctttgatgtaccacagattttgacaaacggaaccggtaatccggtcagatcaagcatgacacttatcatgtacttaaacaaacgtctgtacagtaaggattatggaatgtccggtgcactgtcagtcatactgtttatcatcacggcaatacttagtatagcggtattcaagctcagcggcaacgatgataagagaaaggagtaggtcgatatggcagcaaatgtaaataaaaaaaataaaggtatgggaatccatgccagacgtgcattagcatatatcgtgcttgtaataatttctttcttctgtctgttctggttttacgtaatgataatcaatgcaaccaggtcaaacggagagcttcaggcaggatttactgcaattcccagtacgcatctgcttgacaactggaactcactcttacatgacacacttccggtcataagaggtatgtttaacagcctttttgtagcagcctgcagtgcagtactgtgtgtatatttttcgacaatgacagcatatgccatacatgcatatgagttcaaggccaagaaattcatctctacatttatactgatggttatgatgattcctacacaggttacagcacttggatttgttaaattggtaacaggcatgggactgatggattcatttattccacttatagttccgacaattgcttcaccggtcacatatttttacatgaagcaatatatggagagctcacttccgttgtctctgattgaggcagccagaattgacggctccggagagtttaggacatttaatcatatagtgcttccattgatgaagccggcaatagcagtacaggcaattttctcctttgtaagcagctggaacaattacttcactccggcacttatattacacgaaaacaataagaagacgcttccaatcctgttagcacagcttagaagtgcagacttcttaaagtttgatatgggaaaggtatacatgatgattacattctctatccttcctgtaatagttgtttaccttattctttcaaagcacatcgtaggtggtgttgccatgggaagtgtgaagggctgacacagaccattaactaaaactattttcttttatattttttccttcatcttaaaaggaccgctcaccgggcggtccttttttgcgagcaaaatggcagacgttttgtttatcccctcttgacagaatacgttatactataagtatgaacgataagaaacaaggaataatatatatcataatggcagggttcttttttgccctgatgacattttttgtgaggatgtcgggagatttgccgaccatgcagaaggcctttttcaggaatgcggtagcagcggtagcggctgttatcttacttgcaaaaagtgaggaaggcttcaaaataaaaaaagatagctggaagggactttttctgcgaagcctctttggaacaacagggcttatatgcaatttctatgcagttgaccatctggccatcgcagatgccaatatcttaaacaaattgtcaccgttttttgctataatcatgtcatattttgtgcttaaggagaaagctaacaggacagagtggctgtgcgtggtgacggcgtttataggtgctgtttttgtggtgaagccatctatgaatgtgcagtttttaaatgccatgattggtgtaataggaggctttggcgcaggtgtagcgtattcatttgtgcgaaagctcggtaagcagggagagagagggcctgtgatagtcatgtgcttttcggtattttcatgtatagtgacggctccgtttctgtttgtcggagcaaagcctatgagtgcatatcagattgtcatgctgctttttgcaggagctgcagctacaggcggacagctttcaatcacaaaggcatacaccaaggcacctgcaaaggagatatcggtgttcgactattcgcaggttatctttgccgctctgctgggctttgtttttttgcaacagataccggactatctaagtgtgataggatatgttataataataggcagtgcaatttttaaatggaactataatttaagacacgaggaaaatatatgaactatgcaggaataaaatattgtgacatcgcgaacggactggggtgtcgcactgtgctttttgtatcaggctgcaggaatcactgtaaaggctgctttcagccgcagacatgggaatttgactatggagagccgtttgatgaacagatacaaaacgagatactcgactcgcttaagcctgcctatgtgcagggaattacccttttaggcggtgatccttttgaggaggagaatcaggaggcacttgtgccgtttatgagaagagttaaggagcgctatcccaataaggatgtgtgggcttacacaggctatctgtacgaggaactgttagaaaacggacgcaagcacacagagtatacggatgagcttttatctatgatagatgtcctggtagatggcccgtttatagaggagcagaaggatattacgctcaaattcaagggctctgcaaaccagcgtgtgatagacatggaaaagacaagagcaacaggagaagtgtctatactggaatttacgaaaatatgattagaggatttgaaatgaagaaaaaatgcaacaaattattaggattactgtgctatgcgcttggcattctggcagcgctttatgtgggaggctatcttatgctgattaagcctattcatgtgattatcatggcatttggcaatgatatgctgacgcttccacttttgcttaagagcatcataaagatagcattttctacgacttttgcagggcttgtgtggtgcatcggatacataggctacaactttttcaagggaaatgaggaccctgactgggcggctatagaagcgcgcttcagaaataagcacagtgatacaacaaacgaagatttactgaaggagagagaagtatgatagtccgtgtacctgattatttttcagagtttagctgtatagccggagactgcaaggatagctgctgtctgggctgggaaattgatattgatgaggattcatatgagtattatcagacactgccgggagaggtcggagagcgcctgagaaagggcatgtatgagacagaggatggcgggcacggcatccgtacaaacaattgcgggcgctgcatcatgctaaacgacaagaatctgtgtgatttgtacatagctgcaggagaggcatcacttagtgaggtgtgcaccgattttccaaggtttggcatagagtacagaaacgtggagcagaagtgtctgagccttgcatgcgaggaggtctgccgtatatttttcagcaaaacaaagcctgttaagtttgtagagcaggagctttttggcgacagcgatgatgaccagggcgtaacagaggaggaggcagccttttttgaggaggtgcagcgtgagctgatagccatacttcaggacaggacaaagccaatcggagtacgcgtggatgagtaccttgacagggcaaacgagtaccagaagaaactgagcgaaaatgatgttgaaaagcatatagactggctttcgtttaatgatttttcatttgagcacttcgatatctgcttcggtatcatcaatcagatggagcttttgcgacaggtatggcaggatttcaaggatgatatgcagtcagttctcactgaggctgattatgaaaaacgcatgaaggagtacatggatagcagtgattaccgtgaaaacgatattgagcagcttcttgtatactttaccttcagatatatcatgaatgccatctatgactcaaatatcatggtttatgcatatttaagcgtcatgtttaccatgatagtcagggatatgaacgccacacgcttctttaaaaacggtggcagcttcaccatagagaaccagatggaagtggcaaggatcttctccaaggaagtggagcattccgaggaaaatgtggaggccgccaaggaagaaattatctggggatagttgatttaaagattaaatatattttttagcttttagttttaaaaaggagcttgcacagaaatgtgcaggctctttttgtgtgaaataatatgagacttccacaattatgccatataatcatgtcatatataagaaacgacttaaaaaataattcacaaaatttcaaatgaaaaattatctattatatctaggacctttagtactaaaaagatttcgcatatgttacataaaaatgaataaatagtaaattttaccaaaattttgtaaagtaattctctgtttatcccaatagtcgaaaaccaacgaaaatattataatataagtacgaaaacgtgcgaaaggggattttcgtacaaacaaaataagaaaaggagaagaaatatgagaaagttaaaagaacgctttcacaggaaacatggcatattccgtccggtattcagtttgatactggtattggcgatgattatgactatgattccgtcaatcggaggaaacctgaatgtaaaagcagcttcaactccgatgaatgtaactattcactttatgaagccaagtaattggaattgggcagagcctgccatacagttctggggaaatagcgatggagtgctttccgtaagcggtgacgcaaatgatggaaagccaaaagaacttgaaggctggggcgtaaacggctatttattcagcgaaggaacaacaaatgcaaatggtgacaaagattattatcttactgtcaaaacagatgcaacaggatttcagtttttagattttcaaaataaggatgctaacaataataagcctgcaaatgttgcaaagttaacacagtatactggtgataaaccaattaatgtttattatattacaaaggatggaaaaaattttgagtgctatcttgatgcagatggaaaaacatcggttccagaattgccagagactgagacaaccttccttcttgtaggagaccttcctggaacaggctgggatccaagtgcaacaccaaactttgtgaaatctgaaacaaacgagaatgaatacagcatttctattaaaaatgttccggcgaaaacttatgcatataagattctggaagatgctgctctaaatggttggaacaaggcatgggcagaaggtgaaaatggcaaaaatgtttcgttggaggttaaggcaccagcagacattaccatgaagctggacaagacagatgctgataaaaaaacagatgtaaccattagttatattaaggcattggatgttgaaacaccagcacaggtagaaaaaggagtagatgttgcacttccagcaacaggaacctattacgcaggtgatgaacagggaagcaagactgaaggtgtagatgtaacttatactgctgtttcaaaaggtattacagtaagtggcacaacacttaaggttcctgcttcctatacagaaacagatgtaactattcgagcatcatataacggaacaacaaaagatattaccattccagtagtagataaattatttacatttacaatatactattataatgaagacttatccacagaaacagatatgggaaaggttgatttatggatgtgggatgcagtaccagtaccgaatgctgcgtatgtctttaaggataaagagtatgatgaaactaatggtgtgacctggtttaaacagcagataacagttgatgcaggtaaaataggaaaagaagtaggattaaaagcccgttataataatacaaaaggatgggagggcggctctgataccgcagatcgtcattttacaataaacggtaatgagaatgaagcattatattatgtggatggttcagatccgtctcatgtgaaaccgacaatcgtaccaacggaaaagagataccttgtattggattatgagaatccggaattaaaagaaaaagatattacaccacagttctatacatggacatcaggatatgcttcagtattaaccgattttacatatgcaggtggagataaatggacagtaacaattccagcaaaaccatcctgtacaaaggttgatttttgtattgcattagattcaacaggtgacccatggattaaagatggtggagaccattcagttacattcccttctgaccagaaggttatctatgccagcatgaaagccggcagtgagccggaaattgctatgccatataatgttggctatgaagtagatgcagagaaacagcaggtatcatattactatcgtgatgatacagcatttgtagatggcaccttaaagaatatgactgtagctgttgacgtaaacggaacagagtatccaatgacatacaatgatgcaacaaagcgttttgagtatgtaaagagcggtttaacagatggcaaaacacattatcgttacatagcaaatggagcttatgttgtagatgcattcaattcaaacagcgaaaagtacaataatgcagattattcatattttgaatactataaactaaatgcaacagttacagcagaagttatgaataaatcctttaactacaacgagaatgatgttgttaagtttaaggttgaacaagatatttcagatgataaaaaattagaagtagctagtgcaagtatcgatgtttcttcccttggcggaagtagtgcaatgccaattgaaccggaactgcaggcagttaccatttctgcaacaacagatacaacattaggaattaagacattaccaattactgtaacagaccagtatggtaataaattcagtactacagttgatgttgaaattacagaccgtgtgaaggaaaacaaaaaagatttcgactgggatgaagctgttgtttactttatgatgacagaccgcttctttgatggcaatgaatctaacaataaagcaagtggtgcagatacatatggagagaatccgggactgtatcatggtggagattttgcaggtgtaacagctaagttagattacttacaggatttaggagtaaatacaatctggcttacaccaattgtaaagaatattcagggtgtagctgtaacagatgagggtaaagacgatgttccttataatgcagcataccatggatactgggcaagtgattttacaaaattgaatccaacacttggtacaacagaagaatttaagactatgattagcgaagcgcacaagcgtggtatgcgtattatggttgatattgttgtaaatcatgctggatatggtacagaatcaacatttgctgatatgataagggataagagtgtcagtgaaggagatattaaatcatggcagaatggcatgccggattttgcaacagagaatgcagatgtcagagcaaaattagtagaatggcagactgcatggatgaaggattatggtgttgactatttccgtgtagatacagtaaaacatgttgacagcacaacatgggcagcacttaagaattctacaacagaagtaaatcgatcattcaagatgattggtgaatattttggcgcaggatatgcatcaaatggtagtaccttaggtactggtcagatggatgcagaccttgatttcgattttaatgaccaggcaacaagctttgtaagtggcaatatttcttctgtagagaaattcctttctgcaagaaattcagcacttaataacacatacatgacaggtcagttcttaagcagtcatgatgaagatggatttaaggctgccttaatgaaaggaaaaggatataccgaggatcaggctacatcagcagcgttagtagcggctaccttacagcttactgcaaagggtattccggtgatctattatggtgaagaagttggtttaagtggattaaataattatccatatcagacaaatagatatgacatggatttctctctggcaacaaaggacaatgtcacatatcagcattataagaccatgctttcaatccgtaatgcatacacagatgtatttgcaagaggaagcagaacattaattcttt

SEQ ID NO: 1656 - DNA, 11449 bp, Unknown
  gut microbiota DNA sequence
gctatggtgatactacattatatgttggtatgaatatcaatgataccgcaaaagaagtaaaagttccggttagcttagcagcaggaacagaggtaaaggatttatacagcggtgctacctatactgtaggaagtgacaagactgtaacagttaccattccggcagcaaaggatggtggaacagtcattcttaccgaggtgaagaaagcagtagctccaacaccggcagacccgggcaagaaagatccaacaccagcaaagaaagatggagttatttccgtaacagataaggcagctattgaaaccaaaaaagcagctccaaagagtggcgatgacaatgaagcagctacatatgtatgcttacttggactcgcaatggttgcaatcacagcagctacatatcgcaagaaaaaagcttgcaaataaaacagttttaaactaaacattttataaacctcttagatgccgcaccttcgggtgcggcattttgctataaattgggaaagaagtcatattgctatcatcatgttaaataaattataataagaagaaaacagcaaaggctgtcaaggagaataatatgaaaagtacagcgtttgatatggctatgatggcatacagacaaaatgatatggagggagcgttccgtcaatttctgccactggcagagactggcgatgcagatgccatgaatatggctgcaaatatgtttgaaagaggtcagggcacataccgggatcccgggcgcgcagtgttttggtggaagaaagcagtggagcttggaaatgtggatgcacttgccgattatggtcattatctggtcaccaccttttttgatggcaaggagcagaagcttggagcagggtatctggttactgcaacggagcgtggaaacaacagggcgggagagagcctagtggagtttgctcttaaaaataacgatgccggagtcaaagtatacagaacagcagcagattactgcgaccgggctattgacgctgcgacagattcatatcttcgcacacagtatgtgcagaaaaagggtatgcttaaatataagctaaaacagcacagacttggaaacaattatgtatatctggcagcggtattttcggcgataggagcagtatttctcatgattgcatcagtggatttgtttcttgagctgcatatggagtattgcgatatgtttaagctgttttcgtatagtaaaatgataccatgggagacagatatagcgatgttctttggtgcgatgcttttatttacgcttggaaaggtgacaaataagcttcatgtggcgagctttttgcagcttcttgcatcggtatttgcagtggcagttgttgccatgcactttatctgtgtgataaatgatggcagagtgtggtatgacaagttgctttggtatgtggtacttgttgtcattccgcttatgcttggaaagctgctgggtgagattctgagaaagattatcggcatacagtaaaataatattttgatatgtaaccggaggagaatgaacatgactctgcaacaattaaaatacgtggtgacagtggcagaatgtggcaatataacagaggctgcaaagcagctttttgtatcgcagcccactgtgaccagcgctatacatgacctggaaaaagagatgcagatagttattttcatcaggacaaacaagggagtgatattatcagaagatggtgagagatttctcggtcatgccagacaggtgctcgagcaggtagatctcatagaggggatctacaaggatgatgtggtgagtaagccgcactttgcggtatcgtgtcagcactattcctttgcagtgaatgcatttgtggatgtaatcagagagtttgatgcatatcagtatgattttaccatcagggaggagcagactcacgaaattattgaggatgtcacgaatttaaagagtgagctgggagtcatatatctaagctccaagaatacggaggtgctttcaaagatgctaaagcgtaatgagcttgagttcacagagctttttacagccacaccgcatgtattcatatgtgacagtcacccgcttgcttcaaaaaagagcatcacgatggatgatctgcaggactatccgtacctgacgtatgagcagggagagtacaattcacagtatttttcggaggagtttgtcagcactcttgacagcagaaagaatatcagggtaagagacagagctacactttttaatctgataattggcttaaatggctatacagtgtgctcaggagtgatttccgcagagctgaatggaaggaatattatatcaaagccacttgatgtggaggagtatatgaggataggcattatcagcagaaagggtgtggtactctcgcgatatgcaagggagtatattgaagcattgaaggcgcactgtatgtgacccgcactacaccgagaaagtagcaatttgctgccggaatgcagcaaagtagcggatttcgaggtggagtcagattacgggaatgcgaagcatgtagtaatctgattaatcataaatgagggtcaaaataccttttgcccctttaattataatatataaggtctaaatatatacaaatatttggtacaaggagcatagcatgtacgatagtataataataggaacaggtcctgccggattgtcggcagccctgaatttaaaaacatataaaaagaattttatctggtttggttcgaagaacctaagcgaaaaggtgcaaaaggcagagaaaatcacaaactatcccggatttccacagataagcggacaggagctgtttgaacgctttgacgctcataggagagctgcgggaattgatataacagaaaagactgtgaccaatatcatgcctgcaggaaacggctttatggtgcttgcagacaatgagatgtatgaggcaaggactctcatactgtgcatgggggtgatggctgcaaagcagctggacagagaggatgagctgcttggaaagaggctcagctactgcgccacatgtgacggcatgttttataaggataagaggatagctgtcatatgcaatgacaaaaagtatgagcatgaggtaaaatatcttgcagatcttgcgtcagaggtattgtactatccgtcctttaatgacagtgaaatagagcttccaaatgtgaatatatcaaaggatacacctgttgcattgacaggtgactcatttgtggaaggaattacgcttcgaagtggaaagactgagagcgtagacggagtattctgcctgagaaatgccatcgcaccatcaaagcttatgccacagcttgaaatagaaaacggacatatattggtggacagagcccaacagacaaatgtagcaggctgttttgcggcaggagactgcacaggcagaccttaccagtatacgaaggctgtgggagaggggaatgtggcagcacattcgtgtatacaatatcttagtaaatcagaaaaataatatggcaatggcatagaggttggttaaagcatattaaaggcaattacagctaattatagccacttaccgttgagaagatactgatttctctcagctcccactgagacaaactgtatttcatgtcttagcatgtcctcaaggaagtttatgtagcgcttagcatttacaggcagctcatcatatgacctgcaatttgatatatcggttttccaccctggcagcattttgactaccggggtatatttttccagattttcggtggggtcaaagacgtttgttacagcatttttatactgatatcctgtgataacaggaatctgatccatgatgctcaggacatctagcttggtcagtgcgattttgtcggcatgctggcattttagaccatagcggcttgcaacggcatcaaacggacccacacgacgtggtcttccagtggcagcaccatattcgcccccatacttgcggaccatttcagtccattcaccgttcatagctttttctgcgacaaatggtccggctccgacacaggtagagtatgcctttagtacaccgaccacatggtctaatgaggcaccggggataccggcacctataggaccgtaagctgagatggtggaggagcttgaagtatatgggaaaataccatagtctatatccctcattgcaccaagctgtgcttcaagtacaacacgctttccctttgatagtgcatcctcaaggaatgcaccggtatctgtgatataaggtgcatattttgcagccttctgcctgcaccatgacaaaagagctgacagagacataggctcctgatgatagcaacctgcaagctcaaggtttttagcttcaagcatggtcttaagtctggcctgtacattctcttcgtctaagtggagtaaatcaccgagacggattgtttttttacggtatttatcgctgtatgcataggcaataccgcgtttggtagagccgaaggctgctccggactttgaaaggcgctcttcctcaagctcatcctgtattttatgccacggcattgaaattgtggctcttgttgataatttcaggttttttggtgaaacagatacatcttgtgttctgatctgtgcaatttcattggacagatggtttaggtcaataaccattccgtcaccgagcacacatactacatctgggtgaagtattccggatggaagcagatttaagataaattttccctgtttattaactactgtgtgtccggcattgttaccaccctgatagcggactacgatatccgcatgttctgcgagaaggtcgatgacacgaccctttccctcgtctccccagtttattcctgtaactgctgtaagcatgatgaatgcctccttgttttttgagtttaatatttgtatgttggtgcagagcttgtgctgtacgaaatttgaatggcataaacaagtctgcttataatgtgtatgattctgttacgtgcaatacctaaacgtcttatcagttagtattcttgcaaagatgagtccgagcggcagtgcaatgataatcatgattgctgatgcaaaccatgaaacagcatccgaaagtgccattatgccgaaattgtatatagcccgatatagataaagtcccggaaccattatgactatggatggaacagtaagggatattctcggatatccgttgttttccttgataaaagatgcgagaagccctgctgtgagagctccggcaaatgcggcagcaggagccggcatacctgtcaggtctaccagctcaagccgcagtgaatttgctatggcaccgataagagcggctgttgcagccatgggagctggactgttgaacatgattgagaatccaaacacaccgaagaagctcattataagcctcaggattagatgtagtacggggcccagatccaaatcttcaaagtccataggctgcagtcgcagaagcagcgccataatccatgcaaacatcgtggctaccatgactattattattgcataggcaaggcgttcaagaccggagcgcagatccagctttgccaggtcgattccgcttgtgataaacggaaatcccggaatgataaagagcatggaacagatgtatccggcttcatgaatggttgatacattgaaagccatctctgctatttttaaaagtgccgcatatatgaagcatgaggcagaaattgataccgctatattaaggaacaaagtaaaatgatgttttataagctttgtacgtatgagatttccgatgccggctgctacaaatgccagtatcatttcaataggacctcctccgagcaaaaatgtgaaggcacagcatgctatagctgctgcaagtccaagccttgcaggggagtaaatggcatgaatctgttcaatctcatcaagtcgccggtgaatttcttcgccggtcaggtgggcttcctccgttggaaaattgtcgacaaactgctccatgcgatagagctttgatgtgtttacacctgtgtttgctatgctgagtgactgtgatatacagtcatttccgtcaaagcagttaaactcgattgacataagtccgacatccactgtacatgtgacaccaagcacctttgagagccggttcatggaggttctcacacgccaggctcctgtgccgcaggagagcatgatgagtccgacacgtccgattacagaggctttttcaatcagtcccgccttatctatgagtatatttccatcctgtctggcataatcatgccaggggatttccatatgatttttttccatgatatctgtgtagctgttatctgccataaattatcgcctcggccttttgtacatgtttttcaagattttttaggaaatgagagcttcgcaggaaaataccaatttcatcataccgcttgtcattttccacaagagagtcctgaccgtaaaaaacatatgccataggaagctccttttcaatctgtatcatcagatcccatacggcagagtaagcctcagcctcagtctctttgagttttacggtatctggaagctcacgtatcaggagtattccgtcatgctttacaatgacctgctgtgtgggagtcatatgctcggaatcatatgtgtggctgtagcggtaagcctgtgcatagtagatatcctttttgtctggcatatcgttgtatatttcgtgaaaatgtatatagttcttgtcgtgagatatgtgtttatactcgggcagcggatttccgtgctcatctgtcatgattatcggattttgatgtccgtcggcattgaacctgtacggtatgatatatgaattgcgcagcagatcaaatacggtgttgttgcacagacacataagcagtgcggaaagatcgcggttggtatatgcattgaagagagctttagcaaatttttctgccggaagagatacatcaaattcatcgttgtaaaccagattttcattgaaggtttccataagcctgtcacaggcccatggatcatttaatatcttctgaaacagaatgtctgcatgatcttctcttggaaacattgtcttttcactcatttgaaacacgtccttttcttatataatcaatatttctcttttgagcatttatgattatacaattatgattataataagtaaaaagtataattgatataattgaaatatcatattattatatcattagtatctgtgtattatcggaaaaatgaccggtaaaacgataataaaaaggaggctttaaatatggatataaattttgagtactacaagatattttattatgttgcaaaatactgcaatttcacaaaggctgcgagggcgctcggaaacagccagccgaatgtaacccgcgccatgaacaatttagagcagcagataaacagcatactttttatcagaaataacagaggtgtgcagctcacaccggagggagagcgtttgtacgcgcatgtatctgcagcgatgtcacagatacttgcggcggaggaggagctgtcagacagcacaggactgtcacacggaagcgtatcaataggagccagtgagacagctctaaacatatatctgcttgacaggctaaagacttttcacatggcatatccgggtatcaggcttaggatatataatcactccaccccacaggctataaatgctgtaaaaaacggcatgattgattttgcagtggtatcgacgccggctgaggtggaggcccctcttaaaatgataaagcttggttcattccaggagattctcgtgggtggtaccacttttactgcgctcggaagccagacgctgtcattaaatgagctgcataattatccgcttatcggactggggcgggagaccatgacatttcagttttttaacagattttttatgtcacacggacttgaatttgcgcctgatacagagaccgcaacgacagaccagatactgccacttgtgaaaagtgagcttggtcttgcctttatgccaaagccgatggcagaggctgcgatagcaaatcgcgagattgtagagatagctctggaggaggagataccgcagagaaatatatgtatggtatatgatatacatcacccgatcagtgcggcggcaagagagttaaagaaagttatatcagacagccataaggtgtgattggcagccggtgggatatacataggtaactggcaggttacatattgcagccggtatgttacacattggctggtttgtaacttacatctcgtttaatactttgttaaaatatagtcaggcagataagttataagaatttatcggcagagttttttaggagtattatttaaaattggaaggagattttacactatggctaacagaatcatgttaaacgagacatcttatcacggattaggtgcaatccaggagattgcaacagaggcaaaagcgcatggctttaaaaaagcactggtatgctctgaccctgacttaatcaaatttggggttacagcaaaggtaacagatatccttgataagaacggattggaatatgagatttactcagagattaagccaaatccaacaatcgacaacgtaaagcatggagtagagacatttaagaaatcaggagctgattacctcattgcaatcggaggcggctcatctatggatacatcaaaggcaatcggtatcattatcgcaaaccctgagtttgaggatgtaagaagcctagagggtgttgcacctacaaagaagccttgtgttcctatcattgcagtacctacaacagcaggaacagctgcagaggttacaatcaactatgtcatcacagatgtagagagaaagagaaagtttgtatgtgtagacccacatgacatgccaatcatcgcaatcgtagacccagacatgatgtcatcaatgccaaagggacttacagcatcaacaggtatggacgcacttacacatgctatcgagggctacacaacaaaggcagcctgggagatgacagatatgttccatctcaaagcaatcgagattattgcaaggtccttaagaagtgcagttgccaatgaaaaagagggtcgtgagggtatggctcttggagagtacattgccggaatgggattttcaaatgttggacttggaatcgctcattcaatggctcatacacttggagctgtttatgatacaccacacggagtagcatgtgctatgatgcttccaatcgtaatggagtacaatgcagactgtacaggtgagaaatatcgtgaaattgcccgtgcaatgggagttaagggagtagatgatatgtctgtagaggagtacagaaaggctgcaattgatgctgtagcacagctctctgtagatgtaggaatcccaacaaagctcgaggctataaaggaggaagacttagaattcctcgcagagtctgctcacgcagatgcatgtgcacctggaaatccaaaggatgcaagtgttgaggatttgaaggctcttttccgtaagattatgtaattcggcaacagcttacagggatgtttgtgaatagttacgattaagaatgaaataaaatagaaaatccgggaactgtcaattgacagcattcccggatttttaacgctgatataactattctgacgaccgtgcacatttgtaaaaatgcacgatacttgttctaaatggttctgaatattaccttgaattatatcaggtttacctcgcgaaatacgtcggcaagctcttttggcatagcatcagcgagcagtccggcaagctcctgaggtgtgaaatttttattgtcaagcacccattgggttgtcataaagacagagccctgacaatacatctcaagctgaaacaatagcttgtcggatattttccggtggctttttccctcaatctggtcaatataaaactgacgaatcagctcaaaatcatgctcctttagattgttctgctcatcatttttaaaagcagccttaaagaaaaggtgctccatccggatatattcaaattttttaacaaggctttcgtacactgtactgccctcacccatctggtgaaaggattcaatcagtatcttatcaaaataccagtttatcaggtcatatttgtcctgaaaatttctgtaaaaggtttgcctggtcacaccacatgtatcgcagatttccttaaccgtaatcttctcgacaggagaggaaaccatgcattccttcatggcattggccagcttgtattttatattgttgttcataatgtctccgaattataatgcagatatctaatgagccttaagctttgacataagtgcttcctgcagtgtttttgaaaaattaattccctcttcctgcgcagcagtatttagccaagccggaatggtaagggtttttcggaccgatttatcgaaatgctctttggcatatgccttaacatctactgaaaccatattggtaaatgcatcggtatatgttcctgttatgtctaattcgtcagatagtctgtcaatattgatatcagataatttggatgctttaggaaatttttcattatccatcttagccgtatacagatatcctgcaagacaatcaacagccatggccacagcatcttcaagggtatctccttgtgttgcaagataatttaaatcaggaaagattacagagtatccattatcttccttaaaaaaacatgccggatatattgataacatgatgagtatacctccttatgattatttgattcccgcttgcttacggatagaattttcagtgattttgttcagttctttgcctttatgaaaaggaatagttacttttccgggctttgaaggatgaatataatgccgatgtgatccggtttggtttttgaaaatccacccatcggcaagtattatacgttccatttcagttggtttgatcggcatatttttatccacctttctttagtatatctataatataacatatgatacgtataaattcaatgcgtgtaaatataatatatataaatttaatatgtataattattgcgtatataaactatatattgttgtttatattttagtatgatcagaaatgattatattaccgattaaaaagattgaattttaaaatttatctgctaatatattgatgaaaatattttgaaatatacgaggatatacatacatgaaagaccttacaaaaggaaaaccatcaagactcatactggcatttgccattccaatatttatggcaaatatactccagctcacatacagtatagttgacacgagaatagtctgatcatatctgggagaaaactcactggcagcagtcggagccaccacgacactcagcaatctgatgatagggtttttgatgggaatgactgtgtcatatatttttattataatagcagggcttgtagcgacatttttgtatgatgcatgtgcggcggcacttagggcactgggcgatacagttacgccgcttgtatggtttatcatggtgataccgcttttggtga

SEQ ID NO: 1657 - DNA, 1150 bp, Unknown
  gut microbiota DNA sequence
atgcttaggaagcaggggcatgggatttgaaaaaagagtgaagcaggctttactccaacaccagaagaagtcccatcttgaacctttcgtcagcggttacgctgtgcagtccgtttttgtcaaaacggaaattttcgcctgctgagattgtgtaatctttgccctcgtagtctattacagccttgccctcgagtgcgaaaattattgcatttccaggcgcgcgatgcggtgtgagaccggtgccctcatcgaatgccataagcacgaatttcattgtgtcgttgcttaccacatcaatgttcgtgatactgccatcctcatatgagataagatccttaagcttcatgacctcgcctgatttgataattttgttcatattgttgttctccttttttatgatgatttcggtgtaaatacagccggtttctgttgttactccgcagagtgttttcgaagggactaccagcatatcaccttctgatatggtatgttttgcagcataatctccgataagaaaatcagcgcatccttttgcaccgatgtatacagtggtattatcgtaggattcctgagagattgacgtgccctttccgagagaaaaataggttatgggtgttttgtcactaagccttgaatttcgtgagacggtcatctcgtcgcggatagggcgtaaatcttctattttgaaaaccttgtccataggatttcttgtccttctttcttgaatgttgatttcattatttataatacaatattactataattttgtccaaaaatatgttgcatatacaacaaaaacaatataataaaatacaaaccgcttgctatttctttcacatatgttaaaatatagtcaaagcagtttttctatagcaacctgtgcggtcgttggcacattaattacagatatgactatatgctctgtaaatatgtgaggcataataagatgtcgtccggcgataagggcgtgcagggtcttcaataccttaattttttttcatattccctgaaattcttgcttttaaatgtttcattattttatttaaagcaggataagagggtttttaccacacagatatttcctgctttagtgttttcaaatgaaggaggattttatatgagtggtaacagagagtacaaaagtgatgtt

SEQ ID NO: 1658 - DNA, 319 bp, Unknown
  gut microbiota DNA sequence
gacaggtggtgcatggttgtcgtcagctcgtgtcgtgagatgttgggttaagtcccgcaacgagcgcaacccttatccttagtagccagcagttcggctgggcactctagggagactgccagggataacctggaggaaggtggggatgacgtcaaatcatcatgccccttatgacttgggctacacacgtgctacaatggcgtaaacaaagtgaagcgagagtgtgagcttaagcaaatcacaaaaataacgtctcagttcggattgtagtctgcaactcgactacatgaagctggaatcgctagtaatcgcagatcag

SEQ ID NO: 1659 - DNA, 447 bp, Unknown
  gut microbiota DNA sequence
gtcaaaaggtattttgagataaaaaaatctggaatgtatcaaaacactccagagtagatatcttttataactatgacatgtgctgtatctgaaactgaatctaacccccagctatctatactctgcatatatcatattcacatcttctttcatccagactttactgtcggcctcggaatctcaccgaatcatgccttgcggctcgtgggctataccaccggtagggaattgcaccctgccctgaagaataattatttaattagcttacgctaaccatagtaaacctttgtggcttgtatgtcaagattattttcatttttgataaaatttatgctataatcatacatcgattaaaaaaatcttaaaattttttgtaacaaaacaatcctttctacgtctaacctatgaacaaagtccagctaataaatgtcaatagtaaaatgagaa

SEQ ID NO: 1660 - DNA, 1866 bp, Unknown
  gut microbiota DNA sequence
aaaattgaaatgccgtatgtagacagaatacagaaagtgcagtcagaaggcagttagaagccagataatgtagtcataagacagataaactgtatacagtgtgataatcataatgtaaacatatagaaaacataaagaaggacagcacatgtataatttgtaaactgtaccactgtaccctcattggcaccagattttcctgctcacacaagagaacaggaggagaaggattgagcgcaaaggactcaatggcaaaggaatactttgcagacaatgccaggtttgcggatctgtgcaacaatgtactgtatggaggaagagaggtcatcctgccggaaaaccttaaggaaagggataccacagaggtgctgactgcactcgggcttgacaaaaagaccatagcgatgcagaagatgagggacatcttcaaaaatgccagcatcaaatataccggcagatcatatgtcgtactgataggagtagagaatcagtcggatatacactatgccattccggtaaaaaacatgttttatgatgtgatggcatacggcaatcaggtaaaggaaacatccaaaaagcaccgcagggaaaaggatacggcaacatcggatgaatttctctcaggatttacgaaagaggataagctgattccggtgataacgattacagtatatctcggaataaaggaatgggatggtccaaggaagctgtcggatatgtttggtgatgtggatgaggagcttctgccatttataccggattacaggattaatttgctggccccgagggagataacagactttaccggattcaggacatccatcaggcagcttttcgaggtattgaagaatgcatatgataaggaaaaaatgcaggaagtgctgcagaatgatgaaaaatttagcagggtagacagagagacggttgaggcaatcaacctgtttgcaggaacggatatagatatagatgagaaagaagaggtgattgatatgtgtaaggcgtgggaagatcagaaaaatgaaggcagagaagaaggcagagaattaggagaaagacaaaagataatttctctgattgtaaaaaagctgcaaaaggacaagagtgtggcagagatagcagatgacctggaagaaaaagaggaggttatcgctccaatttacgaagcggcattgtcaatgaagccagattatgatgttgagaaaatctatgagcttcttgagaaaaataagaagctggcatagcagctgtagatactggcagtaggatggggcttcatcccatgagccatggcttgtgcacactctctcacgtgagctacgctatgcagccaagatactgtaggaattatgccttaaagatttacgatactcgacgaaaccgtcgaaacgcgccgtccgtggcgcggttctccttgccctgccatccatggcagttcatttctgcgcatcatgtgcataattcgacagtatctaagcagcttcgctattcgctcacgcaagagagcgtgccacagccggtctcacgtggtaaagccccttgcactgtggcagaatgcaggctgataggcgtgcagtgcagaaacagtatgaaaaagaaaaattatgatgacaaagcaccacctctatgctacaatcaactcaaagcattatatttctgtaagcggcaccacataacagttttttcaggtgcacaccactttgaagagggcagaccacttcgcatcattctacaaaggacatggaagttttcaatgctttaattacccattaacagcaggaaaaattgaaatgccgtatgtagacagaatacagaaagtgcagtcagaaggcagttagaagccagataatgtagtcataagacagataa

SEQ ID NO: 1661 - DNA, 475 bp, Unknown
  gut microbiota DNA sequence
agctcccattcgtgggagctcattcctgtgtatagtgtgcataattcaacagtatctaggcagctccgctattcgctcacgagagagagcgtgcacaagccgggcacatggaatgaagccccttgcgctgtggcaaaaaatataatgacaaagtaacatagctctgctacaatctgtttaaagagacaatttatgaaagagataagctgattcctgtaattatgattacagtatatctcggcaccgagggagataacagactttaccggattcaggacatcaatcaggcagcttttcgaggtactgcagaatgcatatgataaagaaaagatgcaggaagtgctacagaacgatgacaagtttagcagtgtggacagagagacagtcgaggcaatcaacctgtttgcaggaacggatatagatatagatgagaaagaagaggtgattgatatgtgtaaggcgtgggaagatcaga

SEQ ID NO: 1662 - DNA, 494 bp, Unknown
  gut microbiota DNA sequence
atcccagctatagccctcgccacagccgcatcttccctgttttccatcatgtggaaagctttcatctccaccgtatccatcctatggcatatcagtacacctccaactattttaccagtcctcatcatcgtcatcaatagcatcatctacaccggcagcataatcatcatcgctgtcgtatctgtcatcatcatagtctccatccatatagacatcatcataaccatcatcgtatgaatcatgataatatttatttgaaccggagctgctgcttgaagaatctgtactgcttcctgatgaactactactattgtattttctggaagaatagctttttggtgtataactgcggcttccatcactgccacttgaatgataagatgaactgctgtctgacgagtatgagcttgattgtgaatagtcataatcataatacttcatctattgtctgaagattgaacaatctctccaatcacatcacccccctatttctc

SEQ ID NO: 1663 - DNA, 326 bp, Unknown
  gut microbiota DNA sequence
caccggctccggctcccattgagatgccttctttggcgactattgttgctgtgcttttgaatgtcagatttcccgctgtggatgcctgcccgattggaatcattgcggatgccgcaaatgcaaaggcattttctgtcagataatatgcgtcctcgtttccctgaaacaggtcatcctttatgccgtttactgccgtgctgtcaatgtcacctgtgcttccataataaatatcctgagcgccctctatggcatctgcagctccgaatactgctgttccgcttcctactgctactgcaacgtcagctactattggtattgcagcacct

SEQ ID NO: 1664 - DNA, 446 bp, Unknown
  gut microbiota DNA sequence
cggctatggatcgtcgccttggtgggccgttacctcaccaactagctaatccaacgcgggtccatcttataccaccggagtttttcacactgcatcatgcgatgccgtgcgcttatgcggtattagcagccgtttccaactgttatccccctgtacaaggcaggttacccacgcgttactcacccgtccgccactcagtcacaaaataatcagtcccgaaggaaatcaaataaagtgcttcgttcgacttgcatgtgttaagcacgccgccagcgttcatcctgagccaggatcaaactctcatgttaaaagttgatctcagtcaagttaaacttggctaattcgttcattcagatagaatctgaatttactgttttaaaggtcttcaattttcattgaagcgttctgattgattctcaaaatctttcaaggtttctcactgttca

SEQ ID NO: 1665 - DNA, 113207 bp, Unknown
  gut microbiota DNA sequence
tgagtttttccttgtcaagttaaacttggctaattcgttcattcagataaatctgaatttactgttttaaaggtcttcaattttcattgaagcgttctgattgattctcaaaatctttcaaggtttctcactgttcagttatcaatgttctttaattcattgccttgcgacaacgattgatatgatatcaaactttcaagtatttgtcaacaacttttttaagttttttatcaagcagggctacaaggattcgaaccttgaaatgacggagtcagagtccgttgccttaccatttggcgatagccctatatgaagcgcagggggtgggattcgaacccacgcgcccttgcggacaaacggttttcaagaccgcctcgttatgaccacttcgatacccctgcacgagagcgggtgatgggaatcgaacccacgtatccagcttggaaggctggtgttctaccattgaactacacccgcatatttaattgttcacaagtcggggtgacaggattcgaacctgcgacctcctggtcccaaaccaggcgctctagccaagctgagccacaccccgatatgctgttttgccgtttcgtttttgttgcctcaccgaagcgactccgatataatatcaccctatttcatacttgtcaacacttttttacatttttttgaaattaatttttcaaatacgatacatcccgcggttttacaatgttttcggtgatttgaaacaacagttttactgacttcataaaaaagaaaagaacacttgcgtgtccgaactgaaaatttttattaaattagtactcgtgcatatttctcctttcgttaatcgcatgttcatatgtctaattatttcattttgagtacctttgaaaaaatcaagtggctcaaacccagtgtttaagccactttgagagtggactagacgggagtcgaacccgtgtccgaaatacaattccctgtccttctacgagtgtagtttattgtttaacattccctctgccacacgataacaaacaaccttgtggtttcagtagcttcatgatacgcccgatggctcaaagctttgccaacgtcgtttctcacatagtcgaagcctgggtcctaaagtgtgagtgctctaggtcagactgctgccattaggcagcgtatgctaaattatcttcagcgtttaattttaatttggccatttaacgcatcgccatacgactcgcttctccagctgcatgtaccccgtcgaaacctttactagcccatattcaattttttactaacccagatttctgattttgaaatctctctgtgcctctcgcttttgatccttcttggctatgtctgctctcttatcataaagcttcttacctttggcaagtgctatctctactttgaccagactccccttaaagtatacctccaccggcacaattgtgaaacccttttccttcatctttgatgaaagcttctcgatttccttcttgtggagtaaaagctttttaggtctgagtggatccttgttgaagatatttcccttctcatatggtgtgatatgcatgccatacaggataatctcaccgttttcaatacggatgaacgactcctttatgctgccctttcccattcgaagtgacttcacctcagttcctgcaagtgaaataccggcttcgtatttctcaagcaaaaagtaatcgtgatagacctttttgttgttggctattaatttctttggttccttagccatgtcggtatctcctttcctcaaactgctttacaatactaacacatttttttacaattgccaatatataaaacgcaaattattgtaaaccgctggttcacatttctgtttatttacactatataatatattatgacatctttttcaataaatctatcgcacaacgaccgacaaataacagataatcaaataagtatttttaaatcataaaaaaatttcgtcatttttgtcatattattccgccggtttaaaatcaattgtacgcataattttgtcagtactgtccacaacaaccttgattttttgtccaagcttgtatctcttattggtggctgaaccggccagctcataggtatcctcgtaaaactcatagaaatcatctgtcaggtctgtcacgcgcacaagtccctcaactgtatttggaagctccacgaaaaagccccactccgtgacacctgatataactccttcaaagcattcaccaatatgatttgacatgtattcacattttttaagcttaactgtttcacgctctgcctcttctgcacgtcgttcggtctcacttgcctgctttgcaacagcatcgagtatagactcatagtgctccctgcggttatcattcatcctgccgcggatattttccttgatgatacggtgtatctgcaaatcaggatatctgcggattggtgatgtaaagtgacaataataatttgccgccagtccaaaatgtcctgtacatgctgttgtatatcgtgcctgtttcatagagcgcagtgtcagtctgcttatcagggattcttcatctgtgccatccaccttcatcaaaagcttctgaagctcctttgggtgtacctcatcagtgccaatatgaagcgtatagccaaaattattgataaatgtggaaagctttgcgattttttctgaatccggcttgtcatgtgttctgtatacaaaaggtatttcctgccagaaataatcctcagccacagtttcatttgctataagcataaaatcctcaatgagctttgttgccacatttctgtcatacggctttatatctatcggatgaccatcttcatcgagcacgactttagtctccgggaagtcaaaatctatagaacctcgtttcattctctttttgcgtagaattgctgcaagctctgccattttttcaaacataggcacaagctccttatattcttcaatcacagcggcatccttatctgcaagaatcttttttacatttgtgtatgtcatcctgcggtttgtctttatgactgtctctgcaatcttatgatcgatgacttcaccctttttatttattgtcataatgcatgaaagagccagcctgtcacatccctcattcaaggagcatatgccatttgaaagctctcttggaagcatcggaattactctgtctacaagataaaccgatgttcctctcttaagagcctccacatcaagggcactgtgctcctgcacataattcgacacatctgctatgtgtactccaagtacataattgtcgccatccatgtataaagacacggcatcatcaagatcctttgcatcctctccgtctatcgtgaccatcatccagtcgcgtaaatccatcctgccggccatatccgcaggtgtcacatcctttgccacattctgcacctgatgcatgattttctccgaaaaatccaccggcagatcataagcctttactatagaaagaatatctgtacccgggtcatctatatgtccgattatttcaacaaccttgccctccggctttttgccctttttaccataacttgtgatttcaaccactaccttatggccagacatagcaccctttgagcgttcctttggtataaaaatatctgtgccaaatctggtattgtcaggcactgcaaaaccaaaattatcacttgcctcataggtgcagactacctgcttcatgcctcgctctatgacggaaacaacctttccctccttgcggcgtcctgttgtgacaggtgagattgtaatctcaacagtgtccatgtgcatcgcaccatttacatactctgcagggataaaaatatcatcattctctccctccacagtaacaaagccaaatcccctttgatgcgctgtgaatacgccgactgtctttttaatttccgacttcgagtatttcccgcgctttgagagtgttatccttccctctgcctgcaaatccaaaagaatctgttcaagctgtggtctgtcctctttttttactccgagtactatgcaaagttccttgattttcatcggaacatacatgtcatcacacataaagtcatagaccatcttttttcgtgtttcatatttatctatattactcattatctctccttttcgttgccccatctgatttcaaatgcacaggctttaaataaaatttcctccattgacattttcatcctatgaatgttgatgcgataaaaaagactgccgatttctcgacagtctaagtatttaccatattcccatatttaagacaattgatataataaagaaaagaacaacacatacaattgtcgctttaaccagacgtccttcctttgaacgtcccttgttcttgccccaatatgtatcagcaactccggcgatagtgccaagtcctgctgacttgccctcctggaaaagaataactatagtaattactaaactgacgattataaataataccgataaaacaatttttaaagttgccacgataagacctcctaatttcaattctaaataacagaactaatatactacgtttttattgcacagtcaagagttttctttttactctcttcttttgataatctaaaccattttttaatattatacatttttccattttattttacaagaaaatacattataatataattaaaaaaagaaacaactttatatttaggagatttttatgaagtgcatactgtataaaaaagcacttccactcatattattatcatgccttttgcttggtgcatgcggtaattccaaaaatgacgatgtatctaaggagcctctttcccatacttctactgaaaagggcacctgggactctgcaccaaaggtgctcactccaaccgccgacggcacacaaacctatacctgtgatgtggctactatcgacgcatcaaacagcagcagcggctatatcatagtgaattatcacggttctaatcaaaaggtcaagcttcagataaccgggcctgacggtgtcacgtacacctttgatctgcatggaggaaatgaagtgtttcctcttgtctcttcaagtggctcgtatactgtaaccgtttttgaaaatgttgaggggacacaatatgctaccgtgctgtcgcaggtgatttctgtctccatcaccgatgaattcggaccgtatctgtaccctaaccagtatgtaaatttcactgccgattctttggctgtgaaggaaggcagctcactggcgtactactgcagcagcgatactgaggtcgtggaaagtgtatacaattatatcatttcaaacttcaaatacgactatgacaaggctaaaaatgtcaaaagcggctatctgcctgatgtggacaaggtctttaccgaaaataccggcatatgctttgactatgcggcagtcatggccactatgctaaggactcaggctattcccacacgtttagaggtaggatatgccggtgaagaatatcatgcctggatcagtacttatataaaggacaagggctggataaacggcatcatcgagtttgatggtacctcatggaacatgctggatccaacatttgcatctaccagtgattcgccaaagaagttcatagcacaaaaaaatgattacattaccaaatacgtctattaggaggacataaatgtctagaaaatccaagattttgagcaatgcagagctttctgccttctgtcagcagatttctcttatcatagcagccgggctgcctacatactatggtgtttccatattatgtgatgaagcacctgataaacagacacatgatctgcttgagcagatatataagccaatggagcttggtgcaacgcttcacagtgcacttaaagatacaggatactttccaaaatatatgattaatatgatacagctgggtgaagaaaccggccgtcttgaagaggtcttaaactcactctcaaagtactatgaccgcgaagacgaaatagcttcaggcatcaaaagtgccgttgcctatcctctcgtgctttctgcagtgatgattgccgttattgtcgttatgattgccaaggttttacctgtattctcacagatatatgcagagcttggaagtgagcttaccggcaccgctgccgtgctcatgaagctcagtgaatacatcaatagatatctgcttatcattatagctgtcatgctctttgccgcactggttctttttatattttttaagacacgctttggaaaaaagctccttatgaaaactgccctttccatgtcaatcgcatccagccgctttgcaaactgcatgtttttagcactctcaagcggacttgacacagaccgtggtcttgatctggcacaggctcttgtaaacaatcctgtccttgattctaaaataaatgactgccgtaaaaatatatctaacggcgagacattttcagaggcactgctgcactccaatattttttcaaagatgtactcaagctggattgcaatcggcagcaaaaccgggtctatggacgaggtcatgcagcatatatgtacatcctgtgaggatgacacagatgcaaggctgtcacgattcatatcagtgattgaacctgccatggttatcctgctttgtatattcattggcttcatactagtatcatttttactcccactgcttggaattatatcaagcataggatagcttacggaggcacagcatgctgttttttgttcagaaaaagaaatcaaccatatggaaattcataccaattgtgcttttagccgcatgtaccgttttgtttagtgctttctcttcaaagctgtcagatgacaataccaaaagaagcaagagcacgctggaacgcgccctcacacgaagtatcacacagtgctatgctcttgagggaacataccctcctgacataaattatctaacagaccactatggtctcacatacaacagcgactattattacatagactatcaatacatcggctccaatctgcgtcccgatgtgacaataatagagaggaaataacccatgttcaagctaaaatcaagatcacatcaggctgacagtttttttgtgatgctgctgttttttctttttgcgctgactgcttttatcctcgtgctgattggcgtaaagcaatacaagtccactgccaatgccatgaattacaactacgaggtacgcactgtcacatcttatctgcgcgaaaaagtcagacagaatgattccgacgctgcaatcagtgtggaaacaataaatggcacaaaggctctatgtctgaaaaacacaataaatgacatcgtgtataataccttcatatactattatgacggttctctaagagagctctatgtacaggatggttcctcatacagtctggacagcggacaaaggattgtcgaaatcgggggacttgacatgacagaaaccaccgacaaaatgattaccgtaactatcaccgatacatccggtggcactaccgatacctactgctccgtcaattccgactaatcatcgtctgacaataaatgcagcaatatcacgtacaccgctccccgatatgccactcgatgccacacaaacttacataccacaaggaataaaccatgatttcaacaaagcttaaacaatcgaaaaacagaatattcctgcttgagattaccattaatctgctgcttttttcagctcttttgattgtgggactgcttttcttcataaagacccacaagctgacagaagaaactcaggtgctgcatgaggctgttaatgcatgcagcaatgcatcaagcgcatacgaacaggagcatggcgatttaaacgccgtatcatcgctctttgacggctccatctgtgcagatgaaaagctattcatttatcttgataaaagctatcatccatgtgataaggatgatgccgcatacaaggttattgtaagcaggcttgggcaggatgcctacggagtacaaaaggctgacatagagtttatagcagcagacagccactgtgtatacagcattactgcgtgcagctatactgcactttcctctgatggaaggacggtgagcaccccatgaaaaaaagaagagagttttcaaatttcggtttttccaccatcctgcttactttttccatgatatgcattgtcacgttctctgcactcgcctttgtcacagcaaactctgactataagctgagcaaacgcgttgctgataacaacagctcgtattaccgtgcatgtgaaaaggtatgggatgagatatcacagattgataccattcttgcatccgcctacgatggcagtcctgataaagcagcatactatgaggccataaagactgctctatcagacaacgatactgccataaataaaaacctcgctgaaaatgaatcaaacggcaaggttaccggtctgacctatactatcacctgtactgtaagcgatacgcagactctcactgtaaagcttgatatcaactatcctgtccacaggcaggatgctttttataaaataaaacaatggaagctcaataccgacacagctttcgaggaaaatgatacactaaacttaattggaggaaactaaaatggatgttaaaaagatattaaaggaagcgactgacaacggagcatcggatattttcatagtggccggccgccctctcacatacaaatcaaagggagtgatggagtgcctcaatgaaatcagaatgattccaaaagaaacctttgaatttgtcacatcaatctatgctcttgccgagagagatatttcaaaattcgaggaaaccggagatgatgacttttccttcgctataccgggagtatcacgttacagagtgagcactttcaagcagcgtggctcttactctgctgtcatccgtgttatctcattcacactgccaaagccaagcgatttacatataccggactctgttatggagcttgcggaaacaaacaacggcatggtgctggttaccggcccagccggaagcggtaaatctaccacacttgcatgtattattgatcagatcaaccatgagaaagaagagcatattatcactcttgaggatccgcttgagtttttacatcgtcatgacaaatgtattgtgtcacagcgtgaaatcaacacagatacagaaagctatctcactgcacttcgcgccgcactccgccagagtcctgacgtcatattgcttggagagatgcgagactatgagaccatcaatacagctgtcacagcggctgaaaccggtcatctcatattttcatcacttcacacaattggtgccgcaaataccattgaccgaataatcgatgcgtttcctgcttcccaacagcaccagatagccatccagcttgcatctgtgctgcaggctgtcgtctgccagaagcttttacctgccacaaacggtgagatggtgcctgcttttgaaatcatggtactcacgcctgcaataaggaacttaatccgtgaaggcaaggtccatcagattgacggtatcatctacacctctgcagctgagaatatgattgcaatggatacaagcatcttcaatctgtacaaggccggtgtaatcagcaagcatgtggcaatcagcgaggccaccaaccctgagatgatgacaaagagaattaatttaaactaacttcatacttgacggataatatataaaaccccggcatataaaccatgaaacaggtttatatgccggggcttttcatttagataaatatgttaacacaagcaacttaccgttatctatactttcgatattatacgttaatctctgcctttactccactctcatccttatgtgcttcaagcaccggattaactacatcacgcagatatacttctacctggcgaggtgcacgtcccacataaagctcaggcttaaggttcttttcgatatcagcctttgtcagtccaaatgcagggtctgcagcgattaagtctacgaggttattttcttttccctcttcctttactgtctttcctgcctgcattgagagctgtctgatcttctcatggagctcctgacgatttccgccgttctttacagcatccatcatgatgttctctgttgccatgaatggtatctctgccataaagtgcttttcaataacctttggatatactaccagtccatccaccacattgaggcagaggtcaaggattccgtctattgcaaggaagccctcaggtattgaaagacgcttgtttgctgaatcgtcaagtgttctctcaaaccactgtgtagctgaagtaattgcaggattcattacatctgcaagaacatatcttgaaagagatgctattctctcacttctcataggatttctcttgtatgccatggctgatgagccaatctgattcttctcaaacggctcctctacttccttaagatgctggagcagtctgatatcgtttgacatctttgtagctgatgcagcgatgcctgcgagcacatttactactctcgtatctaccttacgggaatatgtctggccagacaccggataacaatccttaaagcccatcttctttgcaatcatcggatcaatcttgtctattgtctcattgtctccgtcgaagagctcaaggaagctggcctgtgttcctgtggtgcccttagaaccaaggagctttaatgtgccctgcacatactctaaatcctcgagatccagcataaactcatttagccacagtgtggcacgctttccaactgttgtcggctgtgccggctggaaatgtgtaaatgcaagagttggctgattcttatacttatcagcaaagtttgcaagctccgcaataacacttataagctttttgtgaacgagctttaatgcttcattcatgatgatgatatctgtattgtcacctacatagcatgaggttgctccaagatgtataattcctgctgccttaggacactgctgtccatatgcatagacatggctcattacatcgtgacgcacaagcttctcacgctcctttgccacatcataattgatgtcatccacatgtgcctttaattcatcaatctgttcctgtgtgataaccggcttgccatcctgtgaaagcccaagctccatctcagtctctgcaagagcaatccagagctttctccaagtggtaaatttcatatcctgcgaaaaaatatactgcatctctttgctggcataacgctcagaaagaggacttgtgtatctgtctgtactcatattctctcctttattagcgattaagcatttttctctcgaggtctatttctttatcaaaatactcgcctctgatatcatccttcggtggctccatcggatattttcctgtgaaacagcccatacagattggcagtccctctaccatctcatgaagtctgtcaattccaaggtagcctaaagaatctgcacctataatctgtctgatatcctcaatagtcctgttgtaagcgataagctgctctcttgcaggaatatctgtaccgaaatagcaaggccataagaatggcggtgaactgatgcgcacatgtacctctgtggcacccgcctctcttaacatacgtactattctgtctgaggttgttcctcgcacaattgaatcatcaatcataacaactctcttgcccttaacagcctcctttaatacattaagctttatctgcacgcttgattcacggcttgactgcttaggtttgataaatgtcctgccgacataaccattcttgacaaatgctgtgccatatggaatgcccgactcaagtgaataaccaagagcagcggcatttcctgactccggtactcctgtcacgatatcagcctcaaccggtgaatccattgcaaggaatctgccagccttgatacggctgccatacacgcttactccgtcaatatggctgtcaggtcttgcgaaataaatgtattcaaacacacatctggcctgtttttcaggggcaagtgccatagtcatatcagactcaatgcccttttcaggagtgatagtgataacctctcccggctctacatccctgacaaactctgcaccgattgtatcaagcgcacaggtctcagatgtaacgatatatgcattgtctctctttccgatgcaaagaggcttaaaaccaaatgggtctctggctgcaataagctttctcgggctctcaaccacaagtgcataggctcccttaagcttctggcaggcacgtctgaccgcctcctccgctgtttttgagttaagacgttctcttgcgatatgataagctataacctcagagtcgattgtggtctggaaaatagctcctgtatactcaagctccttgcgaagctcctttgcatttataaggtttccgttgtgtgccatggcaagtgtgcccttgacataatttaatacgagaggctgtgcattctcacgtgttgatgagcctgctgttgaatagcgcacatgtcccactccgatatctcccttcattggctctaagatatcaggagtaaatacctcatttacaaggcccatacccttgtgtgttgtcacctttccctttggtccatgtgtatcactcactgcaataccacagctttcctgtcctctatgctgaagcgcaaaaaggccataatagatagtggatgcgacatttcctccatcaaaatcatacatgccgaacacaccacactcctcatgaagctcatcaaatacatggttatgctcgtcaatatcagaacacctttctaattttgtaccggtatgactttttgtatctatactagtatttatatactgatttatgttattgtcctggttcataatatctccgtttataattgcgaaatagtaacgcggaataaataatatattagcggctgaatttgcttcctgtaagaagctcaaatgcctctttatatttctctacagtcttcacaacaacctcatcaggtaaaagaaggtcattgtccggattggccttgagccagtctcttacatactgcttgtcaaatgaaggctgtccctgtccaggcttatatccatcaagtggccagaagcgtgagctgtcaggtgtgagcatctcatcggcaagcactacctcaccctgctcatttaagccaaactcaaacttggtatctgcgatgatgatgccctttgtaagagcgtactctgcacatttcttgtagagagcaattgtataatcgcgaatcttctctgcgtactctctgcccttctcaggataaatcttctctaatacttctactgatttttcgaatgagatattctcatcatgatctccaagatcagccttggtagatggtgtataaataggctcagggagcttatcagactcaacaagtccctccggaagtctgattccgcagactgtaccgttctcctggtagcttgcccagccgcttcctgtgatatatccacgaactatacactcgattggaagcatctcaagcttcttgcagagcatgctgtttccgttgaatctgtcctgactgaagaactccggcatatcctttgcgtctactgaaatcatatggttaggaacaacatcctttgtgaattcaaaccagaacttagacatctgtgtgagaatggctcccttgtctgtaatcttattctttaaaatatggtcaaaagcggaaatacgatctgttgcgaccataataaggctgtccccgttatcatatacttctcttacttttccttctttgaatggtttaaattcctgcatgattgtcctccatcttatgtgtaatttattttacaaatcaaatgctacccttaaattatataccagctcaatttgtaaagtcaacgtatattataagtttttttaaataattttacgccatttataagcaattcttatatttattattatatctttaatatatcaaaacaaaagctccggttcaaaccctttgtctgcgccggagcctatataatacagattttatttaacgataagtgactttcctgtcatctcttttggctgtggaagtcccataatctcaagcagtgttggagcgatatctgcaagacatccgccctcacgaagcttgtaagaagggtcagcgtttacaagaatgaaaggaactggattggttgtatgagctgtatgaggttttcctgtctcataatcaatcatcttctctgcgtttccatggtcagcacagatgaataatactccatccacatccttgattgcctgcactgcatcacctacgagtgaatcaactctctcaacagcctttacagcagccggaatcacacctgtatgtccaaccatgtcagggttagcaaagttgatgataataacatcatacttatctgacttgatagcctcaacaagatccattccaacctcaggagcgctcatctcaggctttaagtcatatgttgcaacatccttaggactgtttacaagaagacgtgcctcatcgatattcggctcctctactccaccgttgaagaagaaggttacgtgtgcatacttctctgtctctgcgagacgaagctgtttcttgccatttgctgcaagatactcaccaaatgtattcttgatttcttccttctcaaaagcgataagcttgttaggaattgactcgtcataatccttgaagcatacaaatgttgtcttaaggaatgggcgctcaaagccagtaaacttatcatcgcaaaatgctcttgtcatctcacgagcacggtccggacggaagttgaagaagataacagaatcattgtcctttacaacagataccggtgtgccatcctcgtttgtgataactgtaggaagcacgaactcatctgtaacgtcatttgcgtatgactcctccatagcctttacagggcatgtagcttttacgccttcacccttagtgagtgaatcataagccttctgcacacggtcccagttattatctctgtccattgcatagtaacgtcctgaaagagatgcaatctttcctacaccaatttccttcatcttggcgagaagctgctcgatatagtccttgcctgatgcaggaggtgtatcacgaccatcaaggaatgcgtgtacatatactctgtcaaaattctctttcttgcaaagctcaagaagtccgtaaagatgctcgatatggctgtgaactccaccatctgaaagaagtccccaaagatgcagatcggagtcattcttcttgcagttttcgattgcagaaattaataccttgttcttgaagaaatcaccatcagcaattgcctttgtgattcttgtaagatcctgatatatgatacggcctgcgccgatattcatatgtcctacctcagagtttcccatctgtccgtcaggaagtccaactgcaagacctgaagctgcgccctttacaaaaggacactctgccatcaatttatccataacaggggtatttgccatagctatggcatttccctctttgtggtcacttaagccgtaaccatcaagtaccattaatactaccggtttcttactcatttatatttcctctattcttcatatgaggcttgcaaaatgctctattacagcgacatatgcaagctcacaaaaaatttcattacataataaatgccactaaatgcagctaagctggtgaatttagtgacatttagttattgtgattgtcaaatcaaatattaaattatgatttaatatttacttgtagtttacgatctttccaaaatcagccttgagtgaagcgccaccaactaatccaccgtcgatgtcaggctttgcaaaaagctctgctgcatttcctgcatttacagatccgccgtactggatacgaactgaatctgctgtagcctgatcatagatctcagctacacactcacgaattgcaccgcaaacctcctgagcctggtcagaagtagctgtctttcctgttccgattgcccagattggctcgtaagcgataaccatgtttgcaacatctgatgcagcaacacctgcgagatctgacttaatctgaagtctgatccagtcaagtgtaacaccgctctctctctgctcaagtgtctcaccacagcaaaggattggtgtaagtccagcctcgatggccttctttaccttcttgttgagaagtgcgtcatcctctttgaagtaatctcttctctctgaatgtccgatgataacatacttaacacctgcatcaagaagcatctctgctgagatttctcctgtgtaagcacccttctcctcgaagtacatattctctgctccaacagcaacatttgtaccctttaatgcttctacaacaggtacgatgtcgattgcaggtacacagtaaacaacttcaacatcatctgaaactacgagtggttttaactcttctactaatttaacagcctggcttggagtcatgttcatcttccagttgccggctacaattttctttcttgccattttatatctccttgtatttgtatacaaatatttttttgcctgcggcttaatttcattaagttgctttcggcttatttatcatcagcacaagctacgccaggaagctccttgccctcaaggaactcaagggaagcaccgccacctgttgagatgtggctcatcttgtcgccaagtcccatctggttaactgctgcagctgaatctccaccaccgatgattgtgatagcatctgatttagcaagcgcctctgctactgcaagtgtacctgctgcaagtgttgggttctcaaatacacccattggtccgttccatacaacagtctttgctgatgcaacagcgtcagcgaaaagctcacgtgtcttaggtccgatatcacagccctcacggtctgcaggcatcttgtcataatcatatgtctctgtctctacaggagcatcgattggatttgggaaatccttgattgtaactgcatcaacaggaagaagaatcttctttccaagtttctctgcttttgcaagcatctctttacagtaatcaatctttgtctcatcaagcattgagataccaatctcatagccctgtgctttaaggaatgtgtatgccattccaccaccgatgataagtgtatcagccttctcgaggaggttgtcgataacattgagcttgtcagctactttagctccaccaagaatagctacgaaaggacgtacaggattctctactgccttgccaaggaagtcaatttccttctgcataaggtatccaacaacattctctccacccttagctgtgatgaactttgtaacacctgctacagaagcatgtgctctgtgagcagaaccgaaagcgtcacatacatatacatcagcaaggtcagcaagctcttttgcaaatgcatctccggcttcctgtggctttgtctcctctttgcctctgaaacgtgtattctgaagaagaactacatctccctctttcatctctgaaacagcctttgttgcagcctcacctgttacgttgtagtcagctacaaatgtaaccttctgtccaagcttagcctcaagagctgcagctacaggagcaagtgactcaccctcgtttggtccgtttttaacttttccaaggtgtgagcaaaggataacctttcccccgtccttgattaatttctggattgttggaagagctccgttgatacggttctcatctgtgatttttccgtccttaagtggtacgttgaagtcacatctaacgagaactctcttgccttttacgttgatatcatcaattgatttcttgtttaatgacataatatgtcctcccttatttcaaggcataagccatgtggccatgccatattgtgcatattaaaaaatataattaattctacaattcacagatattcaaaagaaatagccatgttttaaaaaagaggcgcggttcaattaagaccgcgccccttgagtagtcttgagatatactgttcttgtgggtacaagaattaagctaactctgagaagtacttgattgtacgaaccatctgagatgtgtagctgttctcgttatcataccaagaaacaacctgtacctcgtacagatcgtcagaaacctggttaaccattgtctgtgttgcatcgaataatgaaccaaatctcattccaacgatatctgaagatacgatctcatcctcgttgtaaccgaatgactcgttagctgctgccttcatagctgcgttgatatcctcttttgtaacgcctgctttcttaacaactgctgtaaggattgttgtagatcctgttggtgtaggaacacgctgtgcagatccgattaactttccgtttaactctgggataacaaggccgattgccttagctgctcctgttgagttaggaacgatattaactgctgctgcacgtgaacgacgaaggtctccctttctctgtggtccgtcaagagtcatctgatctcctgtgtaagcatggattgttaccatgataccagactggattggagcgtacttgttaagtgcgtctgccattggtgctaaacagtttgttgtacaagaagctgctgagatgattgtatcagaagccttaagtgtctcatggtttgtattgtaaacgattgtaggaaggtcgtttcctgctggtgcagagataactaccttacgagctccagcattgatatgagcctgagccttctcttttgatgtatagaatccagagcactcaagtacaacgtcaacctttaactctccccatgggcaattgtttgcatctgggaatgcgtagattttgatttccttaccacaaactgtgatagaatcatcgcttgcagaaacctcatctgcatgctcgtatttaccctgtgatgaatcatactttaataagtgtgctaacatttttgggcttgttaagtcgttgatagctactacctcatatccctcagctccaaacatctgtctgaaagcaagacgtccgatacgaccaaatccgttgattgctactcttactgccattttaattcctcctagaattgtaaaaagtatttttagggacatgccctaagatgcttttattatagcgaataattctcaaaggttcaagtactttatttgtgtttgttaaaattttcactaaatattttcatttacacacattttttatcattcttcacaattttttttttagatattgcactttattataatctcggctacacttaattaattgctgtaattcgcactttccggcagccagcagcagacaattataaatcatgtaacttataaagttttttaacaacaatacatcagttttacggaggtatttatatgtgggatcagcacatgcactgcatgttttcgggtgacagcgatgccgacccggtattgatgataaaatcagcaatcaacaaagggctggacggcatctgctttacagaccatctggactatgactataaagaggagcccggacttttcgaccttgatatagcagcatatgaaaagcgcatcaaaagacttgcaattgttcttaaagaaaaggactgcccggtaaatatccactggggcattgaaatcggtttacagcctcatattacagacaaaaataatgaggtcaccaaaaaatatccgtttgatctcgtgatcggctcaagtcatgtagtaaacggcattgacccatactaccctgcattttacaaaggcaagacagagcacgaagcctacaccgaatactttgaatcgatacttgataatctgcacagcggggcggattttgatgtgtacggtcatatcgactacgtggtcagatacggtcctgacaaaaacaaatactattcatatgaaaagtatgccgacataattgatgctattttaaaagaaattatctcacagggaaaaggcatcgagctcaataccgccggctttaaatacgggcttggccacccaaatccgaccgagacggtgttaaagcgctatcacgagcttggcggtgaaataatcaccgtcggagcagatgcccacaagcccgagcatgtcgcatacgattttgacagggtttcaaatatcctcaaggatgccgggtttatgtactatacagtatttgaaaaccgcgttccttctttcatcaaattatagccttgctttaaaggccttacagttatcattctatccaactattaaacctcacatgcattcgcaaatgtcaaaaataggagccacctgatctacattttacatcaagtggctcctaaagcattggttccgtaagcttcactgtataacctccaagttccgctttcgctatatgaatttattttggcatttccatattgctttgctataaatctgattctgtttatgacagaattcttattcttttagcttagctatggacctctacccttcttcataaaatcactccttttggttacattatctatgtaaactcttatgagagattctatctttcacttttaatctacaagaactttttcaacgatattatttatttgctaatatatctgtgcgattactgctcttcggctcgccctacagatttaaatattccgttcaatcatccttatagtactttgacttaaattatgtaatccccattggactgtacctcctgtgttttatttttgttcctttcgtatctctttttgttgatttaagattacactaatttcacctatttgtcaatatgctttttgacaatttttatttttattttaaattgtctgatattttatatattttttgttttgtttacacatttcttgcaattcaatcacatgattaaagggagcaaaatacctttgccccctcatgccgtcatttatcatttatcattcttcatcctgtaatcaatacacctgttcaggtaatcgacataatccggattcttgcacatacccttgcctgccacgtcggaaatctttgccacatccatgccgttacacttggtggtcttcataactatgttgagtgcttcctcatcagtgtcgttactgataaaggttcctataccgaatgcaacctttgccttatccttgaaataatcatacaatgcagtcgcacgctcgaaatccaggctgtcactgaacaaaagtgtctttgtccttggattgatccccagactgttgtagtgggctatcatcttgtctccccactcgtacggatctccgctatcatgacgcactcccgaaaaaagcgtcgcataggtgagctgaaaatcacgcaggaagcagtctgttgttatggtgtcagtaagcgcaataccgtttaatataccatactccttaacccatgcatcgagtgcgtaccagtttgaatatgccggattatgcttgtgattgccctgtcctgtacacataatccactcatgagccattgttcccaccggctttaaattgaatttcttcgcaagatatacgtttgatgtaccaataaagtgtgaatctgcaggcagctcaacctctgcgattgcctttacagccatctcctgcgcctcggcagacagacggcgtcttagtccaaattcactgaaatcgctaagcctgtaggtatcctcctcgagcagacgcaccttctcatcaagcctgcgcttaaactgcttaagcagcacatcataatcatatgccatacggaagtacacttcatttacaatagcaagcaccggaatctcatacatcgaagtattgagccacgtgccggctgcatcgattgccagcccacacggtgcatctgttgtgatggtaaactcctcatatcttggctgccagagtcttaaaaaatcaacatatgtgccttttatccaggtgatgttatcaagatattcaagctcctcctccgtaaaacgaagctgacagaaggcctgcacctgctcctttatctcctcgaccatctcatctgtaaaatgcacgtctttatttcggcacttgaaggtccatgtcgttttatagcttgtgaactgatggaaaatcgtttgtcccatgctgaatttatacatatcagtctcaagaaggctgtttattatttgtggcaatctcatttgttttatgtcctcttttctttttctttcaaaccatttactaccggtaattttagtcttgattttaccactgcgactatcaaatatcaagcagacgcacatgtttaattatcttcaatttattttcttttccgtcagcatattcactggttccaaaataaaaactcccatgaaagccactaaccgtgacctccatggaagcttaattgtttatattgcagagataataacccaataaatatataagatattgtaattattcagttataaattatttaaagtatttcacaccgctctcgaatatcttcatatcctgctcgccgtagatattgattgctacagactcgccacggcgctctgaatgagccatcttgccgaggattcttccatcaggagatgtgataccctcgatagacatgtatgagccatttacgttccactcctcatccattgatacatttccgtccagatcaacatactgtgtggcaacctgtccgttttcaaatagcttatcaagccactccttcggtgctacgaaacgtccctcgccatgtgatgccgggttgcagtaggtctgaccaagcttagcctgcgcaagccatgggctcttgtttgaaacaacctttgtatataccatctttgagatatggcggttgattgtattgtatgtgagtgtaggtgactgtgcatcctgctgtctgatctctccatatggtacaagtccaagcttgataagtgcctggaaaccgttacagataccaagtgcaagtccatctctctcattgatgagcttttcaacagcctctgtcatcttcgcatttctaaatgctgttgcaaagaatttagctgatccctcaggctcatctcctgctgagaatccgccagggaacatgataatctgtgatttgtcaattgcctttacaaactcatcaaccgaatcacggatatcctctgctgtgaggttcttgaataccttgactattgtgtcagcgcctgctctttcaaatgccttagcactatcatactcacagtttgttccagggaataccggaataaatactgtaggcttagccactttattcttgcatacatagatattctttgcatcgtaaagaccgctatttaccttgcttgtatcgtctgttgcctttgtatggaaaacgccctcaagctttgctgtccataccttgacagcctcctcaacaggaagcaccatatcgtcacactcgatagtctgcttatcgtttacatagccgactacagaggctgcatctgaaatacctgctgcatcaattacctctctgacctttgaaagtgcatcaacaggaacctcagctacgatattaccaaagcccggtgcaaagagtgtatcgcttgtcacctcatcctcgattgttacaccaagcttgttaccaaatgccatctttgatactgctgcagcaaggccttttccgtcaagcgcatatgctgaaacgattgcgccatcctggataagatttctgattgctgtataaagtgtcataacctgatcatattttggaagatcaaactcatccttatctattgtaaagagaacaagctggttgcctgccttcttgagctcaggtgtgatgatatccttttcctttgccacatccactgcaaatgatacgagtgtaggcggtacatcaatatcattgaaggtacctgacatggaatcctttccaccgattgaaggaagtccgaagccaatctgagcatcatatgctccgaggagtgctgcaaatggctggctccaacgctttggatcctcgttcattctgcggaagtactcctgatatgtcatacgtattttgctgtaatctccgcctgctgcaacgattcttgagatagactcaagcactgcatatatagatccgtggtatgggctccatgatgaaagatatgggtcgaagccgtaagccatcattgttactgtatcgcatttgccctttaatacaggaagctttgcaaccattgactgtgtctctgtgagctggtaacgtccaccatatggcatatatacactgcctgctccgatagagccgtcgaacatctcaacaagtcccttctgtgagcacacgttaaggtcttcaagctctgcctcccaggcacccttcatatctcctgcctcaaccatcctggctacagcaggtgtgctgattttgtccagatagttgtcactctcgcaaggcatctcaacctcaacatctgtctcctggtgagctccgtttgtatcaaggaatgcacgtgagatatttactacctctttgcctctccacacaagcacaagtcttggatcctctgtaactaccgcaacctctgttgcctcgagattttcctcctttgcgtatgcaaggaactgctcaacatcagaaggcgcaactacaactgccatacgctcctgtgactctgagatagcaatctctgttccgtcaagacctgcgtatttctttggtaccttgtcaagctctatgcgaagtccgtcagcaagctctccgatagcaacagaaactccgccggcaccgaaatcgttacatttcttgatgatatggctgacctcttctcttctgaaaagtctctgaagctttctctctgtaggtgcattacccttttgtacctcagctccgcatactgatgtagactttgtattgtgtgcctttgatgaacctgtagctccaccgattccgtcacgtcctgtgcgtcctccgaggagaatgattttatctcccggatctgagttaagtctctggacagcacgtcttggagccgcacccataactgcaccgatttccatacgctttgcaacataatttggatggtaaacctccttgacatagcctgttgcaagtccgatctggtttccatatgagctgtatccgtgagctgcctctctgacaagcttcttctgtggaagttttccttcaattgtctgtgaaaccggtactgtaggatctgctgcacctgttacacgcattgcctgatatacatatgtacgtcctgagagaggatctctgattgctccgccaaggcatgtagcagcgccaccaaaaggctcaatctctgtaggatggttgtgtgtctcgttcttgaagtttacaagccactcctccgtctttccgtccacctcaacaggtaccacgatagagcatgcgttgatctcatcagactcctcctgatcatcaagcttgccctctgcctttaatctcttcatggcaagaagtgcaagatccatcaggcagacaaatttgtcatttctgtccttgtagatatttgaaaatgtattgagataatccttgtaggtattttcaatcggtgtacggtagaagccatcgtcaaacttgacattcttaagctctgtagaaaatgttgtatgacggcagtgatctgaccagtatgtatcgagcacacggatttctgtcattgaaggatcacgcttttcctcattcttaaaataattctggatatgaaggaaatccttgaaggtcatggcaaggttcaatgatgaataaagctccttcagcttgtcctctgccatatccttgaagccgtcaaatatgataacatcagcagggtcatcaaactcctgcacaagtgtcttaggcttttccatgccgatagcacgcgaatcaacagggttgatgcagtgcttcttaatagcagcaaactgctcatctgtgatatttccctcaatcacatatgtgatagcacttctgataatcggctcctcattctcattgagaagcttcacacactgctcggctgaatctgctctctggtcaaactgtcccggtaaaaactctacagtaaatacttttgcatcaccatagtcaaatgtctcctcatagatatcatcaacaggcggctctgagaaaactgtatacaaggctttcttgtatgtctcctctgatatattttccacatcatatctgattaatacacgtactgcctccacagttgtgattcccagataatgcttgatttcatgctttaattcctttgcctttaccgcaaagtcagtttttttctctacatatacacgacgtacgttactcatatgttctcctttcaattcgagagtatgtaaccaattattcgttaccgtccggctttttgcacaatcggactttaaaactatggttgtagtataacactttagttatgataagtataattaatatatttaatttgttttataagttgcgttaattatagttttcttatataatgatatgagaatcaaaaggtatcatcatatttatacggaggataacaaaatggatataaattatgagctttacaaggtcttttactacgtggcaacgtccctaagcttctctgaagccagcaagaagctgtttatttcacagtccgcggtaagccagtctattaagactctcgaaaagaagctgggacagactcttttcatcagaagcacaaagaaggtacagctcaccgcagccggtgccctgcttttaaaacacattgagcctgccatgaatcttattgcccgcggtgaaagccagcttttagactcaggcacacttggacttggccagcttcacatcggcgcaagcgataccatatgccgttatctgctggttccttacttaaagcagttccatcagaggttcccgaatgtgcctatcaaggtcacaaatgccacatctatccagtgtgtggagcttttggagcaaaggaaggttgacctgattgtcacgaattttccaaactcgcacctcaatcactcatacagacagaaaaccatatgcaacttttccgatgtttttgtggcaaatcccaattatttcaagcttcgcaagcaggagatagctttttctgagctcaataaatatcctatcatgatgctcgaccgaaacagcaccaccagtgaattcctgcataatctgtttttacagcaccaggttgacctgattccggaaattgagctaagcagtaacgatctgctcatagacctggccaaaatcggactgggtatagcattcgtgcctgactactgcatcaaccatgagaataaggagcttttcgtgctgaagacaaaagaaaagatgcctccacgccagattgttgtgtccgtaaacactacaatgcccgtgtcagcatccactgaggaatttttaaatctgctcccagaagtcggcaactagttttccgacatttgctatattgcatggctttctgtcactccactcgcgtggatagagcaaatcatattctctctgccagaatctctcatctaatagcaaaatgacacctgtgtcctccgtcgtcctgattactcttccggccgcctggaggactttatttatgcccggatacctgaaagcatagtcaaagccacagccgttttcggcatcgtaataatcctttaatatagttctctcattgctgatctgcggaagccccgttccgacaactatagcacctatcagtctgtcgtttttcaaatcaatgccctcaccgaatatgcctcccatgatgccaaatgccacaagtgttctgtccgattcatcactaaacctgtccagaaattcctccctctcagcctctgacatattatttttctgcagcataagctctgtttcgtctgcatatttttcacagtaaatatctgccacatcattcatcatcttatatgacggaaagaaaaccatatagtttccagtcttttgcgtgacaacagcattaatataccctgcaatgcgctcatactcactccttgagcgcctcgtgtacctcgtactcacatcggttgccatcgcaagcagcctctttttgctgtcaaacgtgctgtcagcatatatggcatagttgtctttttttgtgcttagcaggctcttgtaatagtttacaggcaaaaatgtcgctgaaaaaaacacagccgacttgcccttatccagcctcttttgtatattaagcgacgggtccacacaaaaaagctttagcatgaacctgccatcagcctcaagctcggaatacatcacgtagtgctcatccaccagatcataaatgttcaggaaattgcgaagctcaaaataaaaatccataacatcctttttccccggaaactcattagccttctgcaaaaactcatccagaagtgtcataagcctcataaaggaaaataccatattgccaaatgtatcatataccgtgtaattctcacactcacgcttcatcccaagcagtatcttattgcacttttcaagcgctttctcaatagagcggctgtgctccttcataatgcgcttcacagtaaggaaatcctccttataaatctgagcgctatacatctgcctgcttctttcgaccatattgtgagcctcatcaatgagaaaaatataatctccctttatcccctcctgaaaaaatctcttaagataaacatttgggtcaaacacatagttgtaatcgcagatgatattatcacaccagctagccgtatcaagacaaagctcaaacggacaaacggtatacctatccgcctgtgataaaatatcatccctctcaatcatttcacatctgtgaagcaggtcaaaaaccgcatcatttactctgtcaaaatgcccctttgcatacggacaggttaccggattacattccatctcatcacacggacatagcttttccttggccgttatctgaatagtttttgccctgtaaccatttttttcaagcagcgcaaacgtttcctttgcgactgttgcggtgatcgtcttcgctgtcaggtaaaagattctgtctgccagctcctcaccaaccgccttcactgccgggaaaatagtagagatagtctttcccacaccggtcggagcctgcataaaaagaagcttctgacgcataattgtcctgtagacatccgaaacaagctttttctgccccggtctgtactcaaatggaaaattaagttctttgattgaagcctgtctttgatttttcatttcacactgaaacgttgcccatttgccatactcttccatcaggtcatcaaaccatttttttatctcttcaaatgagaactcctcgcgaaaatacttagtctgctccgtttccagattgcagtaggtcatctgaatgcctatcgtttccatattattttgcagagcaaaaatatatgcatagcacatagcctgcgcacggtgcacaaaaaccggattttcaaacagctcaacccttctgtacattcccttaatctcatcgacaaaacacttgccatcctccgtaaagatgccatctgccctgccctcgacagtcagctcatacaaatcaccttcaacaacaagtgaaagcggtacctctgcctgatactccttccccatgctgccctggattttcctgtgaatgcgtgttccctccatcatggcatcggcactcatagctctggatgaccggttgtctatgtcaccctccctgaaaataaattccacaaggtttctgaccgaaatatgtaattgtgttttcttttcactatagttatttccagcttctgtcatgtactctccctgcatatttcggattatgtcaacggttttgtgttccgacaatattttcagtctaactccagatatttttaatacactgaacaaaaaaaagggagagctccaagaagaaactctcccaaaggaccttattcaattgtattacgctacagtgaatttatcaaccacattatcaaatgcctggtcatcgcccatatagcagaccttaaagtcattgtttgtaccaattccaatcactccgagaagtgatttcgcatcaataagaatctgtctatatttgagatcaatgtcaaaatcgcacttagaagcagccccaacaaattcctgaacatcatccaatgtgttaagtctgattactgtttccttattgtacatagttaacaccacctttataatctaaaacatagtgctttcgcacatgccaatcaattgttgcgcctattataacatctgatattcatttgtcaaaaaaatcataatccgtcattttccgtcaattcatgtcattttttttaataaatatcttttgcgtaaccgatttttcactatattttcatgcatgttttttttaaaaaacaatataactgtgaaattcttataaaaatggtacgatatttaattaatttaaattcattttttacaatttttcatttataaaactttattctcgtaattctttaacgcatctatatatatttcaccgagcttgctaagcttcgtgcccttgtgcttgatatagcctatatgcattatttcactttccttaagtggaattgccgcatagtcatcaccgtttaaatcctcagaaataatacctgagcacagtgtaaatccgttgagccccaccatgagattgagcattgtggctctgtcatcagcctttatgacacgcttgtactcatacgtgctcatcatctcctccgcataataaaaggaattgttcacgccctgttcaaaggtcagacacgggtactcctgcaaatcatcaagtgtaatctctttttggccggcaagcggatgttttttccagagatacacatatgtattgcatgtgaagagctctttaaactcgatgtcacattccttaaaaagctttcttaaaaccttttcattgaaatcacttaaataaagaactccaatctcactctttaagttctttacgttgtctattacctctttcgtctttgtctcgtggacagcaaactcgtactcatccatgcccacctctttagcaagctgtacaaaggcctttactgcaaatgaatagtgctgcatggaaaccgagaatttctttttggactccacattcagataccggttctcaagcagatgatactgctccacaacctgtttggcgtatcctaaaaactcctcaccctccgctgtgactgtaattccacggttatttctcatgaataccgtgattccaagctcctcctccacctctcgtactgtggcggacagattgggctgtgaaacaaaaagcttcttcgccgcctcattcatggaattggattctgcaattgtaagtacctgtctgagttgttgaagtgtcattttctctccatcttaaataaaattgtgtataaacgatgccctgtgtatcggtgatggtcctatctcctttagtgccttgatatgctctgccgagccatagcccttgtttgatgcaaatccatagccgggatatatgttatcatactcaaccatcatccgatcccttgtgaccttagccacaatgctggctgcccctattgatatgcttttggcatctccctttataatcgggacttgctttatatccacccccgggatggtgactgcatcgttaagtgtcaaatccggtgccggatcaagctttccgattgcctgtctcatcgcctcatatgtagcctgcaatatatttatctcatctatcctctcgtgcgacgccatacctattccaacagaaaccgccttttccattatgacatcgtaaagctcatcgcgctttgcagccgtaagcttctttgaatcattgatatataaaatatcacagtcctttggcagaataaccgcacatgccacaaccggacctgcaagcggtccgcgtcccacctcatctatgccgcaaatatgagcatatgatgcgtactcgcgctcatatttcttgagaccttcagtgcggataagctccttctcatacttgtccagtcgcttttttgcactgtctacaagcttaatcactccgcccctttcatctgagccgtatgcctcaatgaactgtccaagctgtgaatctgtgatgcttttcagttgttccttaatatcgcctattttttctgctgacatatccttgtccttatcgtctattcttcagaatatttcttcttaacttttattcataattattcttcgcaactatttttcgtaactattatcctattatttttccggtctctcaagagtgatattgccaagcttaccgcttctgaaatcatctatgatgagtgcagccgccttgctgtaatcaggctctcctccctttgaaaggcattttctgttgacagcgacagcacttataagctctatgatatcattttcctcgcttacctcgtatctttgtgccaaaagccccggatactctgcttttagaaactttacaagctccacggcaagctcatcaacatttaaaatctcatcctttatcgaaccgatgagcgcaagtctaagtcccactgtctgatcttcaaatttcggccacagtatgcccggggtatcgagcagctcaacacttttattgagcctgatccactgcttgccctttgtcacgcccggcttgtttcctgtcttggcacaggcttttccggcgtatgagttgataaatgtggactttccgacgtttggaatacccaccaccatagctcttaccggtctgtttttgataccacgctttcggtctctttcaatcttttctttgcaggcctccatcacgatatctgtgatgttcttcatgcctgacttgcttctagcatcaagactgactacaaaaaagcccttttccttgaaaaatgcactccactccctggtgcgctccttgtcggccagatctgccttgttcataagaatgagcctgtatttgttttttccaagctcatcaatgtccggattacggctggatagcggaattcttgcatccacaagctctataaccagatctattaatttaatgtcctcctgcatctgacgctttgccttggtcatatgcccagggtaccactgaaaattcataattcacctgtcctttatctatatatgttataactattgctacttgatggttccaaagcttccaaggcctgaaaatctaaaccatgccttgccgataatatagtctctctttacattgccaatattggcatagcggctgtcctcactgttgtttcgattgtctccaagtacaaaatactcgtccttttctagctctataggatctgaggcaagccctgcatcctccattgaggcaacgtctgttgattccttgtacagctcatcattcacgtacagtgcgccgtcttttatctgaacagtatctcccggcaccgctaccactctcctgacataataatgcgacttattatttccgtttggcagaaatactatcacatctcctgcctttggctttgacatgatatatgcaaacctgttcacaagaatattatcatcgttctccaatgtctgctccatagcctggcccaccacatttgtacgtataccgaaaaatgacaccagcacatatgccagacctatcactacaatcagctccactacccacgaaacaatttccttgaacaatggcagattaaattttcttctttgccttctaaagctaagtcctgctcgtcttctggacatcttacacctcttgctaactaatattttattgcgtaatcttaattatatattgttttcatgtttgttgcaagctgtaaccctgaaaactaaaaagaccattctcatacgattgctcgcagaaaatggtctctttcgcgtaaaaatattattttacaagctctttaaccttagcagcttttccgatacggtctcttaagtagtaaagcttagcacgacgtactttacctttacgtacaatctcaaccttctctacgtttggtgagtggagtggccatgtcttctcaacacctacaccgttagaaagctttctaactgtgaatgttgtacggtttgatccgttctgctttttgattactgttccctcgaatacctggatacgctcacggttaccctctttgatttttccgtatacctttacagtatctcctacagaaaactcaggtgcctcggcctttaactgctcgttctcgatgcttttaataatttcacttgcgttcattttgtgacctcctaattattttgacgttcttaatgctactactattttcacaacagaggaccatctcttttattcacaacattggtactttaccacagattcatgggatttgcaagtattttttactatcttttgcctacctcatgcattatttttagtcatccagtatacggatgattttgaaaaatgcaatcccatactctcctgcagcttcatagatgcctcattgcccacgattatctgtccatatggtatccagccgttttccagagccctgttgaaagcatatgtttcaagtgctgtggcaatcttttgatgcctgtactggggctttacatagagcatgcctatgctgccctcctcatggattccgataattcccgcgagagtattaatggtatcattagcagtattatcaccaaaaaaagcgccatagactgcccctgcctctattctttctatgatatagtccggattgtcaaagcccgggtacattggcgcagcctcctgtatatcagctgcatccagctttcttatagttaagccatttggcatcggctttccatccggtctgtacagtccgctgacagatagcttttctttgtttgtatacacagcctgcctgcactctacagtctcattaaagccatttgctgtaaagagctcaacatatctttgctggtgaagcactatgccatttacaatctgatctgtaacgttttttgaaatacgctgactgctgtatttatcaacagactttgtgacattttcctgcaccaaatcaataagcttcgactcgccctcatccggccttgtatgaaagcatacctttgagaccatgtcccgaagcagatattcgccatctgcctcaaacagtatctcggcacagcccctgtttataagctctatcatatcaatatgaagcagtttatttttcataagaaactctctgcatttatcaagtcttttaaacccggcatacaaatccggtctgcgctcctttgtgcgctcaatagacttttcaaggcgccatgcatctatctttttctgattgcctgacatgagtacctcaggcacctttttgtcatgccactcaacaggacgtgaatactgaggatattcgagcagattgccatgaaacgactctgtctctgccgaaatatcattgtgcaatacccccggaaccagacgtgaaatcgcatctatcattaccatcgacggcagttctccgcccgttagaacatagtcaccgatagaaacataatctgttaccgtctcctccagcacgcgctcgtcaataccttcatagtgtccacatagaaaaatgaggtcatcacactttgcaaattctgctgccatctgctggttgaacacgcggccctgtggagtaacataaatcagacgcgcattgtgattttttatttcttctgctgtatttttatatgctgtattttcatataatatattttcatcggcgatatttttctctgaattatcacctgaatggacctgattacatttattgatctgactcaccacactgctcacagcctgatacaccggctctgcctgcataagcatccctgcaccgccaccatatgtgtaatcatcaaccttattgtgcttattgtgcgcaaaatccctgatatttaccgtattgagtgatataatattctgttttaaagctctgcctgtgatactctctgacagtccctgttctatcatctgtgggaataaggtcagcacatgaaatctcatttcctatatctcctatatcatcctgttttacagttttacgatttaaaatgtatgattttgttcaattttatatctcattttacggtttttgcagtttgagatatagctatctcaaacctgccagcagatgcaccttcatcgtgccattttccacatcaacgtccagtatacaatcctttattgccggaatcagcaaatcatttgcaccggctttcttaacaacgtacacatcgttggcaccggtctggagtacatcatctatgactccaagctcctctccctcgtctgatgtgacggaaagcccgataagatcagctataaagtactcgttttcctcaagcggcaccgcattttcccttgtcacaaaaagaggtgcctttttatatttttctacatcatttatgtcatctatgcccttaaatttcaagataacctggttcttgaaaaatttgacagaagttatttccaaatccctgcgctctttgccattatccagaatgacatttttaagctttttaaaacgggcagcatcgtcagtggttgggaacacctttacctcaccgcgaatgccgtgtgtgctcgtaattacacctacctgtagtaaatcttccattctctgtctcctgatattaatataaatcataactattcagcccacgcacattctcaaaaccatacaataccggttctgaatagttactataaattataaaaaaacaggcatctcataagagatgcctttatgttactgtactatctcaacaataacctttttgtcttctttagaggctgcggccttaacaactgaacgaatagccttagcaatacgtccctgcttgccgatcactttgcccatgtcagactgtgcaacacgtaattccaaaacaattgctttctcgttttcggtctcagttacattaacctcatccggataatcaactaaagattttgcaattacttcaactaattctttcattacgccacctctttatcctatttctcgataccagcactcttgaagattctagctactgtctcagttggctgtgcgccgtttgataaccatttcttagctaattcctcatttacatgatactcgctaggatccttagttggatcgtatgttccgatctcctcgatgcatcttccatctcttggtgatctagagtctgcaactacgattctatagaaaggagctttcttctgtcccattcttcttaatctgatctttactgccattttgtttcacctcctcataggtttattaaataatatatatcaaaagtaaaataaatacttttgttaacaaaacatgaaattctttaatgaaatccattaaaacggaagtcctttgaataagcctccaagaccaccgcctccacggcgtcccttcttgccgcccatcataccgggcatctgcttcatgaacttctttgtctgctcaaactgctttacaagtctgttgacctctgatacatccacgcctgctcctcttgcaatacgagccttgcggcttggattaagaagctttggatttcgtctttcctcaggtgtcatggaatagatgattgcctctgtgcgggccatgcccttttcagcttcatctgtatcaatatccggcatcttgcctccaccgatacccatgcccggcatcatgcccatcacgcttgaaagaccgcccatcttcttcatctgactcatcgaatcaaggtacatctcaaaatcaaactcatttttgcgcatcttctgctcaagcttcttggcctgttcctcatcaatgttctcctgcgccttctcaatcatggaaagcacatcgcccatgccgaggattcttgaagccatacgctccggatagaactgctcaaggtctgaaagcttctcgcccatacctgcgtatagtatcggctttcctgtaacggctctgattgaaagtgccgctccacctctggtgtcaccatcaagctttgtgatgacaactccgtcaattcctatcttttcatcaaaggtacctgctacatttaccgcatcctgacctgtcatggcatctaccacgaggatggtctggaaaacatcagtagcttcttttatctcaataagctctgccatcatatcctcatcaatatgaagacgtccggcagtatcgatgataacaacattgaaatcgtttttcttggcgtgctccacagcagcctttgcgatgtcagcaggcttgtttttatcacccattgagaaaacctcaacgccctgcttctcaccatttatctttaactgctcaatcgcagccggacgatatacatcacaggctacaagcagtgatttcttgcccttgctcttaagctttccggcaatttttgctgtggtggttgtcttaccggctccctgaagacctaccatcatgataacggtaagctccttgcccggcctgaaagcaatctctgttgtctcagagcccataagcttaatcatctcttcgtttacgattttgatgaccatctgtccgggattgagaccattcatgacatcctgtccgattgctctctcctgaacactctttgtgaactgcttaacaaccttgaagttaacatcggcctcaaggagtgccatcttaacctctttaagagcagcctttacatcatcctcagtaagctttcccttgctgcggagatttttgaaaacgttctgcagtttttctgataaactgtcaaatgccatattacagctcctctaatatctgattcgaaatagcttcgatttcattcattaatagctcattatgtgatttcttaaaatcatttgtcagctcatgaatccttcgtatgtcactctttatggacatgaacttttcaacaagatgcagctttgcctcatagtcaagcagcttcttattgcatctcttaatcagatcggcaacaccctgacgggaaatcccctcctcggatgcaatctcaccgagtgacaaatcattgaagacaaaatcctcatatacctgacgctgatgctcattcaaaagctcaccgtagaaatcatataaatatgcctgttcaagtttttcttccatatcaagtatcctctttttccctcgaacctatggtagaataacacatagtttgctcggtgtcaagtaaaaatacttgatacttttatttttatatcatagtgcgtacaattcttggcttatagcccttcttctcgagcgcagctataatctgctccttgtgctctgtaccaaaacactcaagcgtgatgcgaagctcgacagccgcacttctgtttgtagtgacaaactggttatgctccagcttgattacattgccctgtacatcggcaagagtctgtgaaaccttggcaagctcgcccggcttatccggcagaagcactgaaacagtaaagattctgtctctgaaaataagaccctgctgtacaactgatgacatggtaataacatccatgttgccgccacttaggatagaaaccactctcttatcctttacaccaagatgcttaagcgcagctacagtcagaagacctgagttttcgactatcatcttgtgattctcaaccatgtcgaggaaggccacgataagctcgtcatcctccactgtgataatatcatcaagatttttctttatgtatgggaaaatatttgagcccggtgtctttaccgctgttccgtctgcaatagtatttacgcttggtaaagtggtcacttttccattcttaaatgactcctgcatacaattagcgccggccggctccactccgataaccttaatctttggatttaagagctttgcaagtgtggatacacctgttgccagtccgccaccgccgattggaacgaggatatactcaacaagcggaagctccttgaatatctccatagcaatagttccctgtcctgttgcgacagctaaatcatcaaacggatggataaatgtgtagccctctttctctgcaagctcatatgccttggcacatgcctcatcatacacatctccgtaaagcactacctcagcgccgtagctctttgtacggtttaccttgataagaggtgtggtggtaggcataacgatgacagccttgcagccatagcactttgccgcatatgcaacaccctgcgcatggtttcctgcagatgctgtgatgagtccctttgctctctcctcgtctgtgagggtgcttatcttgtagtacgcacctctgaccttgtaagctccggtaaactgcatattttcaggcttcagatataccttattgcctgtctggtcacttaaaaaatcactgtaaatgagctttgtctcaagggtgacctccttgaccttctcacttgcttcttcaaatttatctaatgtcagcatatttgttctccctttcatttcttcggtataactattcatacccacccacatattattcgcaaaaatgcattgttctcagtggttctgaatagttatttttcattatattataccaaaaattccgtacagatatatataaactgatatatcagattattataaacaatataacttatacgctcaaagatattctcaaattattccgttttagtgtcaaacaatgcattcacgaactcgtccgaatcaaatttctgcaaatcatcgatggtctcaccgactccgatatacttgaccggcactgaaagctccgactgtatcgctacagcgataccgccctttgccgtaccatccatcttagtaagcacgatgcccgaaatctttgccacatcagaaaactctctcgcctgaacaagtgcattctggcctgtagtcgcatcaagcacgacgagcgtctctctgtacgcatccggatactcactctccaggattttattaatctttccgagctcattcatcagattctttttgttgtggagtcttccggctgtatccacgagaagcacatctgcgtttctggcctttgaagctgcaactgcatcatatacaacagctcccgggtcagcaccctcggcaccgccaatcatatcaactccggcgcggtttgcccattccttcagctggtctcctgctgccgccctgaaggtatcggcacctgcaataactaccttcttgccctgttccttgagctttcctgcaagctttccgacagtggtagtctttcctactccgttgacaccgattacaagcacaacagatttttcattttcaaatctgtaggctgtctcctccaccttcatctgctccttgatgctctcaatcaagagttccttgcactctgccggctccttgatgtgctgctccttcaccttcctctgcagatcctcaatgatattctccgtggctctcaccccgagatctcccatgatgagaatctcctcaagctcctcataaaaatcatcatctatatgcgaaaatccactgaaaagtgaatctatgcctgaaacaatattgtctctggtctttgtcagtcctgaaacgagcctcttaaaaaagcccggcttcttttctttttcttccatttcaactctccataaataaaattttactgtgtcagatcattctctataagattcactgaaacgagtgtggaaacacccttttcctgcatcgtaataccatatagcctgtccgcagccgccatcgtaccacgtctgtgtgtgataacgataaactgtgtgttctttgtaagcttgttcagataatttgcatagcgcgaaacgtttgagtcatcaagcgccgcctcaatctcatcaagcagacaaaacggtgatggcttaagtgcctgaatggcaaacaaaagtgcaatagcggtgagcgccttttctccaccggacatctgcatcatattctgaagcttctttccgggcggctgtgcgacgattcttatgccgcactccagtatatcctcgtcctccacaagctccagtgaaccatgtccaccaccaaaaagctgcttaaaggacttgtcaaactctctctgaatctcggcaaacttctctgtaaactgctttctcataccactgtcaagctcatcaatgatgccaaccagagtcttttcagcctcgataaggtcatcatgctgtccctttaagaactcataacgcgttgaaatctccctgtattcctcaatagcgttgacatttacatctccgaggcgtctgatttcgtcctttatgcctgcaatcagcttctttaatgaaggcagatcatcgtatgcatcatttctaagctctgctgccgcatgcggagtaagctcatattcatcccacatgtagttggtctgagtctctgtagcctccttaagcttctctctctgactgttcaatctgaaaagctccttatccagatcagcctgtttctttgaaacttcctcctgctttgcaaaaaagcctctgtaatcctcagacatcttttccttttttgtaaggctctccctaagctcctcgtcaagcttagaattgttgtcctttgatgccagaatggtctgtgtgattgcatcaatatcagcctgcttctttttaatatcatcctttgcagcagctgcaccttccacaaggctttccttctgctcatcaaatttctctatctctgaattgatacgattgatattttctatagcgaactctgccgtctttgtaatatttgcaagctcaagtgaaatggcagcggccttgtgtgaagcctcctgctcaagtactccctgcttttcaagtatctcactgtatgagctgttttccttctcaagctgctcctcacgctgctttgatgcctcaagctgcgctgcaatatccttcttgccctgatttatctcttcgagctgtttttcaatcccggcattttctgtgcgcagatcctcgtagacattcgcactctccttcttttgctggtctgccctgtcaacagagatctgtgctgtattctgctcaatatacttctcctgcagcaaggtctttgtggctgctatatcctcctcgccaagcgcaatagcagtcgcaatatcatcctttctggctctaagctctttaagctttgtcttagtctgatcaactctcttttcaagctcctcaatctcacgatttctcgcaagcagattggatgaatttttaaacgcaccaccggacatagagcctcccggtgccagatactcgccctcgacagtcacgatatggagtgaatagtgatttttctttgcaagcgcaatggcattgtcaattgtgtccaccacaatcactctgccaagcaggtatgcaacaacctcatcaaacttcggatcacacttcaccagcttatttgcaatgccaagcacacccttttcgccgagtgccgcctcatttttagtatttctgtttgcacgcacactagtaagaggtaaaaacgtagcccgaccaaaatgattggccttcaaaaagccaatcatctttttggctgtagcctcatcctcagtgacgatattctggatattaccacttaaggctgtctctatcgctatctcatagcgcttatccacctggataagatctgaaaccaccccgagaagccccggatttttagccttctgctccataacacgcttgatgctgttgccatagccatcatagcgctcggcaatatttttaagtgactcaagccttgaaacagacttatgatactctgtggaagcttcctccatcaggcgggcattctccttagacttgtctctccactccttagctttagtcaaaagagccgactccttttcctttaaacctgaaagttcttcattgacagccgaaagtttcttattagcctcatccaatatatcatcaagcccggcttcccttgtctttctatctaaaagacgcttggtaagctctgcctttctgatattaatctgctcaagcatagtggcaaagcgctgctgtctcgactgtatatcgcctctctcctgaagcagggcaataagctcattcttgcccttttcaagcccgtcattgcagcggttaacctctgcaagcacagcctcatgctcatcaatagcaagcttctcagtctgcttcatctgcgctattttggcttcaagtgcagcctttttgtcatcatactctttcctgcttttaatacgctcagacttttccttttcgatagctgaaagcctcgactgcaaatgctcatcggtcatttcagccgtgtgaatctgctcctttaaaagctctatctgattctcaagcttctgtctggtggatgaagtgcttgtgatgctctcacgaagagactcgatacgctcatccatctgctgcatatcgttcccaagcctctcatactctaccttgatgctctcgtatgtggcgttggtctcctttagctcgtcatccgcaatagcgtatttctcatcagctgacttaagctcggtctcaatgcgcgctgactcaagcaaaaacatgttgacatcgtagttcttcagttcttctctctttttaagatatgtatgagccttctcggactgtctctgtaacggacctacctgtctctcaagctctgtcaggatatcattgacacgcacaaggttctcccgctcattatcgagcttcttttgtgctgtaagctttctctttttaaacttgacaatgccggcagcctcatcaaacagctctcgcctctcctccggctttccacttaaaatcctgtcaatctggccctgtccaatgatggaataaccctctttaccgataccggtatcatagaaaagctccgaaacctccttgagtctgcacggattgccattgattagatactcactctcccctgaccggtaaacacgtctggcaaccgtaacctcattgaaatcaatcgcaagcgaatggtctgaattgtcaagtgtgatggcaacatacgcgtatccaagtggcttcctgttctcagtgcctgcaaaaatgacatcctgcatgctggcaccacgaagctgctttgcgctctgctcaccgagcacccatctgaccgcatcggcgacattactctttccactgccatttggccctacaatacctgtgatgccgttgtggaactcaaaaacaattttgttggcaaaggacttaaagccctgtacttccaaactctttaaatacattaaaaactcctattccctgtttctgtacaaaagaagtgcctgatatgcagcctgctgctccgccgccttctttgtatggccttctccctcgctgacacgctcgccgtccacaagcaccgcaactgtaaactgcttgtcatggtccggaccgctctcatcaataagttcataggaaagctgctcgtgtctgccctgtataagctcctgaaggatagtcttgctatcataaaagagctgcttattctcaatatcagtcatgataaacctaagcacaaactcctttgcattagtaaaaccaccatctaaataaattgctccaatcactgcctcaagtgcatcagaaagaatcgattttctctttcttccacctgtatgatcctcgcccctgccaagacgtaagtactttccaaggtcaagtggctttgtacaaagtgcaagagtcggctcacaaacaatgcttgcgcgcagtttggtaagctcaccctcaggcttttgcggataattgataaacaaaaactcacttgaaactatttccaaaacagcatcgcccaaaaactccaggcgttcgttatcagaatgctttttcatgtgcttttcattggcatacgagctgtgtgtcagtgcctgctcaagcagatgccgattcttgaacgtatagcctattttgctttgaaattcatttaaatctgccataatttttcctctatttctatatctatccattttacatattccgtgagtataacgaaaagccctcataataaagggcttttcattagttaaacatactactgctcgcttacagcttttttaatctgctcaacagcatcgcctacagtgacgattttctctgcttcctcattaggaatctcgatatcgaactcttcctcgatacccatgataatctggaatacatccagagagtcagcgccaagatcatcaatgaaggttgactccatagtaacctcggtctcgtccacgttaagtacctcgacaataatgtctctaagcttctcaaattccatttttaatacctctcatttctgtttatagtgactaatcatacagcagtactgctatctaatcagccggcttattaataatatattctttaattttatcattaatctctttttccttaaatgtaacacactggaaaacagagttagtgatttcctttgccttggagctgccgtgggtctttaccacaagaccattcaatcctaaaagcggtgctccgccgtactcggtcgcatcaaatgactttagcgtattcttaagagccggaagtgcaagtgcagctcctatcttgctctttagtgtgctcatgagccccttctttatgactccgataagagtggagctaaggccctcgtagagctttaatatgacattgcccgtgaaagcctcgcagactataacatcggcatctccctttggaatatcccttgcctcaatgcttccgacaaaattgatgtctgtgcactctcgaagaagcggcatggtctcctttaccagggcattacctttctcctcctccgcaccgatattgaccagtgcaacctttggattcttcacgccgacaacatgctccatatagatagagcccatcttggcaaactgtaccagatgctcagctctggcatccacattggctccacagtctatgagcagagatacgcccctctcagtcggaataagcggtgccaaaggcggcctttgtatgccctttatcctgccgactattacctgtcctccgacaagtacagcacctgagcttcctgccgaaacaaatgcatcagcctctttatttttgaccatattcatgccaacaacgattgatgactgcttctttcgtctgattgccccaaccggtggttctgccatctctataacctcaggcgcatctactatttctatctgctccttaggatatgtatacaaagaaatctccctctctaccggtaccttctgtcctacaagaaatatctttatatcatttcttttgttaaccgcatctaccgcaccctttactacctctgcgggtgcattgtcgccacccattgcatcgagtgcgacccttgttgtactttgcattgtgacctccctgtgcctgctaaaaagcaaactactaattgattaaataaaatatactataatcataggtataaatcaataaccaattcactactctatatggcttccatcattctcccggactcattgaaataaccttgccacagttccataaatcagcagtgcgctttgctgcatcaagtctgtcctcatccgacttaaaatcaatattcacagagtggcatccgcactcaaggcatgtcacataatatgagctgccgcagtcctcctcgagaatcccggcaccgccacagagcgggcactcatagatttcaactaaatcgtctatattattcatgatagtttgcttccttctttctttaatatctaaatatcctttcagtataataacatccctgcaagctatatacaagcaaaaagtaccttcattttattatgggataaaaaagggataaaatcaatcaaaaaaggattgaacgatatcgttcaatccttaattttactggttttctactattagtcctgaggaatgatttcttttttgttgtatgatccgcagttcttgcaaactctgtgtggcatcataagctctccacatttgctgcattttactaaagtaggagcagacattttccagtttgctcttctcttatctcttcttcccttagaagatttattctttggacaaattgacatttgtttacacctccttaaacttgttaaatatatcctggaacgctgccattcttggatccggtacaaaactatcgcaactgcaggtgcctttattcaagttcatcccgcagactttacaaatacctttgcaatcgtctttgcacagaactctcattggccagttcaccagaatttcggcgtagacaagtttatctacatcgagttcaaacccaatcaggtagtcagtttcctccatctcttcatcgactaatgctccgtctgtgattttcagagtcttgtcaatgtcaaaatgcatgtttgttggaacttcttccaagcatcggctgcacggtatcgctatgtctatatctactgttcccgtgatgtgcactgctgcattctccacgtttgagatatgaagtgatatcggccgctttttcagaataggataatctcctaaacgtgactcaaatgatgtgagcgtaagctctgtctcaattgttgtctctttattaatagattttacaatggttgatatatcaatcatagttctctcctattcacacctaaccaattatacatattggagtggtgtttgtcaacaaaattttataatttatccacaactttttgctttttattagccaacaagctttactgtctcgcggcagattgcaagctcctcgtttgtagggatgacgcatacctttacgcttgagtctgctgttgagataagtgcctccacgccacgtgtcttgtcgtttgttacacggtcaatctttatgccaaggtaacctaaatatgccataattttttctcttacgaagcttgtgttctcaccgattcctgctgtgaatgcgatagcgtctactccgttcattgctgctgcatatgctccgatgtattttgctactctgtagctgaatacctctactgctgcgatggcacgcttgttgccctcattgtaggctgcctcaaggtctctgaagtcgcttgatactcctgacatgccggctactcctgacttcttgttgagtacattcatcacaccatcgatatcaaggttttctttctttgcgatgaactccatgattgatgggtcgatatcacctgaacgtgttcccattacaagtccctcaagtggtgtaagtcccattgatgtatctacgcatttaccgtttaatactgcgctgactgaagctccgtttccaaggtgtgctacgataatctttgagttgtttaagtccattccaaggtagcttgcagcctcctttgatacgaagctgtggcttgtgccgtggaagccgtatcttcttaccttgtacttctcatagtactcatatggaagtccgtagaggtatgctttctcaggcattgtctgatggaaggctgtatcaaatactcctaccattggtacatttggcataagtgcctggcatgctctgattccgataatatttgcagggttgtgaagaggtgcgaggtcgttgcactcctctacctgtgcgattacttcctctgtgatgactactgagtctgagaacttctcgccgccgtgcactacacgatgtcctactgcatcgatctctgcaagtgactttactgcgcctgtctttggatttacaagtgcatcgagtaccatctggatggcctctttatgtgttggcataggtgcctctgtgatttccttatcaagcccctctttctgatatacgagtctgccatcgattccgattctctcgcagagtccttttgcaagtacctcctctgaatctgaattgatgagctggtatttcagtgatgaactaccgcaattaattactaatacattcattgttttgtctcctttggtttaaaattacaatactattgttagtataaacttatttttcaaatgcgacaagggtgtttttgtggtattatgggtttgaactctaaaaaatacattatcgattaaaggagcagcaaacatgaaggtcgcaggtgtgattaccgaatataatccattccacaatggtcacaaatatcagctagagcagattaaaaggcagacatctgctgattatatcgtcgtagtaatgagcggtgatttcgtgcaaagaggtgagcctgccatcattgacaaatacgagcgcacacgcatggcgcttttaagcggtgccgacctggtgcttgagcttccatcggtctttgccactgcttctgccgagttttttgccggtggcggagtcagtgtactcaaaaacacaggtgtggcggacatgctgtgctatggtgtggagtctgtggaccatgaacttacaaagcttgtggctggcgtgcttaagaatccgcctgctgagtattctgcatcgcttgccttgctgattcagggtgggatgagcttccctgctgccagaagcagagcactatgtgaatattttcgagataactatgatatctcttcagagaaattagatactttcatagcttcacccaataatattctggccattgagtatgagaaggctttgatggactgtgatattacgggatttcctattcagcgcatcggtgaaggatatcacagcactgattcgacaagcgagttttcttccgctacggctgtgcgcggggtgatttcgaccttaattgatatagacaaacacaacactattactaatatgcagcttgataattcatggattttcacaaagttcagtcagctaatgccatcagactgcgccgatattcttgcagattgtattttaggcggtcatattgtgtttccggatgatatttctgaaatgctttactatcgcctgctgacctggaaggataaaggctttgcgcggtattcagactgcacaaaggagctttctgcaaagatagttaaaaatatatataaatatgaaagttttacgcagttttgtaacttactgaagagtaaaaatctgacttatacgcgtatttcaagggttctcacgcatattttacttggtattgagaatgatgattttaacatatgtatggataatccttatctgcgcatactcggtttcaaaaaatcatctggagaacttatgcatctcctcaaaaaaagagcatcagcgcctattattacaaaagtcgctgatgctccgtacgagcttatttccaaggatatttttgccgctgatttgtatggcagactgtgtcattcacagcaaaatgagtttacacatggggttgtaattatttaatctacagctccattataatttctcttgccagactttcctctataggctttgcatacactcccggtgcaaactcaacagtggctcctatgcccttttggagcacgaaacgcagcttgccgtctctcacctttttatcggtgtagagtttctttacaagctcttccctgtctatatagtcaggtatacgtgtcaaaagaccggctctctcatagagctttatcacgcgctctgcctgctcctctgacatatagccaagacgggctgacatgagtgcctgtgctgccattccaatcgacagtgcctctccgtgcagcagcttatagtcgctgaccgtctcaatcgcccggcctactgtgtgacccagatttaaggtttctcgaagaccggcttctctctcatccttcatgaccacattatacttgatacggcagttgttttccgcaatatactcacatgcaaatttcttgaatgaatagatatcatccagattttcctctataaattcaaacatatcctcgctgcctaagcatgcgtgcttgatggtctctgccataccgcttgccatctggcgctgtggcagtgtcttccaggctgctatatctatatataccttttggggctgattgaacagacctatggtgttggtagcaagaggtgtatcaattgctgtttttccacctaccgatgcatctgccgccgctagaagggtggttgcatagttgataaacggcactcctctgccgtaggttcctgcaataaagcctgataagtcggttaccacaccgccaccgactgcaatgatacagcagtctcttctgtacccctttttaagcatggcatcctctatttttgcctttgtctcacgtgacttgctcttttcacccgccgggaaaacaaacaaatccactgagtatcccgcatgctttattttctcacagattggaagagcataaggatcacgcacatttgtatctgtaatcactgcaaatttctttatcttgcccacaagaccattttccaggtcagatacaagggtgtctgagaggttgtagcctatctcaatatcatatgtgtcatctactacttttttgagttctacattgaatatgctcatctttttctcctgttatgatatatttttgtttcttttatgtgggaaactgctacagtatccccacagcctgcttggcgagcttatctgcctcttcgttgccctctacccctgagtgtccttttacctttacaaaagtaagctttattttatccctaactgacatgatgtattcgtgataagctatagtgcctgccttgtttcgcttccaggcccctgtggcccacatctctatgcccatgtagtcatagtatatgaccagttccttaattccaagctctatagccttttttacggcagcctccgcgccctttatctctcctgctacgttgcgcattgtggccatctcggcatcattatctgccccctgcagcacgtatttttcatggtcagtcacaagaaagcctccatagccataggtttgtgtaaccttgttaaaggagccgtcgacaaacgcatacgtactattttcgccggatgatttcattcccgtaatggttttctctccagcaataattttctctccgttaataaatttttctgcctcttctatggtcttaaagcttttatacactgctccctgatatccgtcaaccattgctttgcaatcattccagttgaaatatatcccgggaacctttcccttttttaccgcatagtattttgatgccatgctttatttctcctataacactcttgacaaaaattcctgtaatctctcactctttggtgcgccaaatacttcctcaggtgtgccctcctcagctatggtaccctcattgatgaacatcactctgttggccacttctctggcaaagcccatctcatgtgtcacaactaccattgtcatgcctgcctctgcaagctccttcattactgaaagcacctcacctaccatctcagggtcaagtgccgatgtaggctcatcaaacagtatgacatcaggattcatagcaagtgaacggataattgccactctctgcttctgtcctccggaaagctgcgccggatatgcatctgccttatcgaggagacctattctggtgagaagctcatctgccttctttgatgcctcatccttcgtcatcacaccaagcttcaccggtgcgagcatgatatttgcttttattgtcatgttggcaaacagattgaactgctggaaaaccatgccgattttctgtctggtcacattgatgtctgtcgacttgtctgtcaggtctgttccttcaaaaaggatttgtcctgatgtaggtgtctcgagcagattgagggagcgtaaaaatgtagactttccacagcctgacggcccgatgatggcaattacatcacctctgttcacctctgtgcttatgccctttaatacctcctgctctccaaaactcttgtgcaggtcttttacctctagtatcacgttattatctttcattgcttctcagtctcctctcaagtttgcttactccgtggcttaaaagcatcactataaccagataaataagagctacagcaataagcggtataaatgcctcgtatgtgttgcttcgtatgatatctccaccctttgtcagatccatcataccaatataaccactgattgatgtctcctttaggaggctgataaactcgttaagcagcgccggaagtatatttttgacagcctgcggtatgataacaagcttcatggtctgtctgtaattgagtcctaagcttcgtcctgcctcaaactgtcctatatctacagacatgattcctgaacgcacaatctctgccacatatgcagctgagttgaggccgaaagcaatgactgctacaagtatcttgttggtcacagatgcaagtactacatagtatataataagaagctgtatcatgacaggtgttcccctgatgatggtcaggtatgccttgcaaattccgtttaatatggcaagaccgccgtttctgtcatggctggttctgactatcgcaattaaaaatcccagcacaataccaagcattacggcaaatattgtgataactattgtattgccaagaccctttacgatatacatgtaacgattgtccttgacaaagttgtcatagagcttttcctttataccgattgaagagcctgactggctgtcttttacgataatctcctgctttgtggtgatatatgtatcggtaaaatcaacatttttctgtctgtcctctgtcactgtaaagcctgctgccccgacatccaccttgcctgatgatacagcggcaatgattgcgtcaaactgcatatcctctacctgcatatccatgccaagctcatcggctatggcctgcatgatatccatatcaattcctgtgaccttgttgtcctcatagtactcatatggagggaactctgcattggttcctaccttaagtgttccgtttgacctgtcaatgtccttcttcacgtagggagtctttcccacctgatcttcagagccgatatagttgtcgatgatgctctgaactgttccatcctgctgcagcttttcaagcgcagtgtttaccttgtcgcgaagctctgtattaccctttttcaggcagaatgcatagtcctcgttggtaaactcctcgtccagtatcttaagtcctttgttttcctttacaaaggcaagtgccggctgctcatcaataactacgcagtcaatcttgccgacctttaatgcctggactgcatcagcacccttgttgtatctctctaccttggtgcctgaaccgtcgttctcataatcagatacatagatatctcctgtggtaccgagctggacacctattttcgcaccctccagatcgtccacacaagtgacctttttgctgtcgcttttgccgcatgcgcataagcaggcgatgaatgtggccattaatgctgccataagcaaaatcataatcggttttttcttaatggatttcatattattcctcatttctgtataaatatttattcaagattatatcatattagtttataaaaaaaaagagtctgattttctcagactcttttataccatatatttatgcatcatgctccatgttgcttaacttcttcgcctggtcggctgcgatacaggcatcaattatctcctggatatctccgttaagaatcttgtcaagcttatagagtgtcagattgattctgtgatctgtcacacgtccctgtgggaagttgtaggtacgaatcttctcagcacggtctcctgtaccgatctggcttcgtctctcctctgcctctgcatcctgcttcttctgaagctcaaggtcatagagctttgtacgaagaagtgcaaaagccttttccttgttctgtatctgtgacttctcagtctggctgtagatgacaatacctgttggataatgtgtcagtcggactgccgaatctgttgtgttgacacactgtccaccgtttccggaagcacgcattacgtcaattcggatatccttgtcatcaatcttgacatccacgtcctctgcctcaggcatcactgcaactgagcatgtggatgtctggatacgtccctgtgactctgtctcaggcacacgctgcacacggtgtactcccgactcgtactttaggatagagtatgcacctgagccctttaccatgaactcgaccgacttcatgccgccgattcctgtctcatcggcatcaagtgtctccaccttccagcctctgttttctgcgtagtgcacatacatacggtagatttccgctgcaaaaagtgctgcttcctctccgcctgcaccggcacggatttcgacgattacgttcttgtcatcgttaggatcctttggcagaagaagtattttaagctccttctcaagctcctccacctgttcctttgaatccttaagttcttcctttgcgagctctctcatctcttcatctgattcctcatccaaaatagccagtgaatcctcgatattctgcttgcactctttatatttcttatatgtctcaactataggagcaaggtcactctgctccttcataagctttttaaatctgtttgcatcatttgccacatccggctcgctgagcagattcatcagctcttcataatggtgtataagatcttctaacttatcaaacatgtttttcctccttgctgtcaaacactcccgatactaccctgtcgtttcccgccaggtcctttatcacttgcacatcgctgaatcccgcaaactgcatcatctgcgacacctgtctgccctgatcgcagcctatctcaaaaagcagcctgccatgcggctttagatttgccctgcaatcctttatgattcgcctgtaaaataaaagcccatcctcagagccgtcaagagcctcatggggctcaaataccgacacctccggcatcagatgcggtatctcgtcgcttcttatatatggtggattggatactatcacatcatacatctcatcgacatgctcaaacagatcgcttctctcaaaatcaacaaacacgccgttaagtcttgcgttttcctttgccacattgagcgcctgctttgagatatcacaggctgcaccgtccacattggtcgtgttctttaagatgcttataattatgcagccgcttcctgtacacatatcaagcactctcataccaggctctatcaccttgagtgcctcctctacaagagtctctgtatcctgacgcggtatgagcacattgctgttcacacggaatttgagtcccataaactcctgctctccgactatgtactggagcggaatacgctcagcacgcttactcagcaatgcttgatattcccctatctgctcctgcgacatttcctcatccatatgcacatagtaatatgtgtgatctatcctgcatgccatggctaaaagcagccatgcatcgttttttgcatcaactatctttgctttttgtaatatgctttccccaagtaaaattgcttctctatatgtcatatataccttctatccggcggtcaatgtgcacacacattgttttcctcctgccatttcttccagtcaaacacagcctcaaccgatgcgatgccaacctctatcatttcatcatccggctcctttgtggtcattcgctgcattaaaagcccagggacactaagcatgttgacaaccggattgtcatatctgcccgcaagtctgataaactcataagatacacctgcgattacaggaataagcacaagtcgtaacaataactgcagcggctttgaatccacacggataaacatgaaaaacaatatgcttatgagcattactataagcagaaagcttgtaccgcagcgcttgtgatgctttgagctttttctcacattttccactgtaagaggcagcccgtgctctatgcagttgatgcatttatgttcagagccgtgatacataaatgtgcgcttaatatcaggggtcagcgatataattgctatatcccccagaaatattgccagtctgataacgccctctatgaacgctatgagcatctgtgagcttatcacctttttaaaaaaccctgaaaggaaatacggcaatgcaaaaaaaagtgcgagtgctatgacaattgacagtaccactgtacctccaagcatggcattttcctgtttcttttctttggcagccctttttttcttttcttccgctgtgagttcttcttccttttcctttttctttgaagccaaggtaccttcatcatcctcgtcctcgaaaaatgacgctgaatacatcagtgtgctcatgcccagataaagcgaatcgacaaagctcaccacacctcttaaaataggaatctttctaactgcatcaagcgtctttgaattcttacgctttgacaccttgacatctatttcatggtcaggcttcctcacggctacggcgtatgtgtccttgttctgcatcattacgccctccatgacagcctgaccgccaatacctgaatacttcataaaacctctctatattccaaaaaaggttgagatatattgcaacctcaacctttcaagtaactatatgattctatttcataccatatttcttattgaactgctcaatacgtccacgagcctggttagctttctgctgacctgtgtagaatggatggcactttgagcaaatctctacgtggatctccggctttgtagatcctgtaacgaatgtgttaccacagttacatgtaacagttgcctgataataatctggatggattccttctctcatgattttcacctcttttatattcttatcgtatttctttagcttcactctttatacccgtatgcccgatccgcatatgatacttgctgcaagagcgacacgttgcgtccgtttacatcccgataaacagcttagttattgtagcacatgaatctgtcaattgcaagacatttttataaaattctgtttttctttacaagattaacaaattccttgttgctctttgtgtgtgcaaacatgttgagtacgttctcaacagcctcatcagagcgcatgccgttgaaggctttacgcatattatcgactgctgcctgctcatcctcatcaaggagcagatcctcacgccttgttcctgattttactatatctatagcagggaagattctcttctcggaaagctttctgtcgagcacaagctccatgtttcctgttcccttgaactcctcaaatactacatcatccatcttgcttccagtatcaacaagagctgttgcaagtattgtcaggctgccgccgtttctcatattacgtgctgctccgaaaaatctctttggcatatgaagtgctacaggatcaagtcctcctgaaagtgtacggcctgatggtggaactgtcacattgtaagctcttgcaagccttgttatgctgtcaaggagtatcatgacatcattaccatgctctacaaggcgctttgctctctctattaccatctctgacactctcttgtgatgctcaggaagttcatcaaatgtagagtagattacctcgacattgtccccctctatagcctccttgatatctgtaacctcctccggtctctcatcaataagaagaataataagatgcatctcaggattgtttacagtgacagactttgcaatctctttaagtaatgtggtctttccggccttaggctgtgaaacgatcatgcctcgctgtccctttcctattggagagatgagatctacaactctcatcgcaacacttgctccgggtctttcgagacgcagtctctcattcgggaatataggcacaagatcctcaaagcttgtacgcttctgtgctacatccggtgtatatccgttgacagtggtcaggtataaaagagcctggaatttctcacgctcagacttcaccttcatattaccctttacgatatcacctgtctttaaattgaagcggcgtatctgcgcaggtgccacatagatatcatgatctcccggcatataattatcacagcggataaatccaaagccctccggcattacctcaagtatgccttctgcctcttctccactgtcgagcgctgcataatcatctttaaaagagttggcacgctcctcggctgtaccgtttttctcagcctcctctgcctcttttgcatcctcctcgagcattctttcaataatctgtccctttttcagtgatgaaacgcccttaattcctcttgccttcgccagatccttaagcacaaatgccgacaaactttcatatttttctctcatctgttccatttcgtcttctccttaaatttgataacagtatttattcaattcgtctaaacaatattatttaacaaatatatctgtgtagctattgggaaataacgcctgaattgacttttgaattattaattattgattatacatcatttctttaaaaatataaagcgatttcttattttttatcatatttttatataatcggttatctgcatagttacttgatttaaatcacctgcaatgttatgattattcaaaagaatttttagagggagaattaccatggataataaagaaaaagcactgaaatgccacgaagagtggaacggaaaactcgaaaccatcgccaaatcaaaggttaattcaagagaggaccttgcaattgcgtacacccccggtgttgctgagccatgtaaggtcatagccgaagataaggaggctgcatacaaatacacctggaaggcaaataccgttgccgtagtgtcagacggaagtgctgtgcttggtcttggaaacatcggtccttacgctgccatgcctgtcatggagggtaaatgcgtacttttcaaggagtttggaaacgtaaacgctgttcctatctgtctcgacactcaggacactgaggagattattgctgcagtcaaaaatatcgcaccgggctttggcggaataaacttagaggatatttctgctccgcgctgctttgagattgaggagagacttaaagagatgctcgatattcctgtattccacgatgaccagcacggaactgcaatcgtcgtgctcgcaggtatcatcaactctctgcgcctgaccggtaaaaagaaagaggactgcaaggttgttgtaaacggtgctggctcagcaggtgttgccatcactaagcttcttctgacatacggctttacacatgtgaccatgtgtgaccgtctgggcatcataggaaaggactatccaaatctcaactggatgcagcagaaaatgacagaggttacaaaccttgagaatgcacagggtactcttgcagatgctttaaagggtgctgacatattcgttggtgtttctgctccaaatatcgtcacagcagagatggtttcttccatgaacaaggacgctattctttttgccatggcaaatcctgttcctgagattatgcctgatgtggcaaaagctgcaggtgccagagtggtcggtaccggaagaagtgatttccctaaccagataaacaacgtggttgcattccccggaatcttcaagggtgcacttgagggacgcgctacacagattactgaggaaatgaagctcgctgccgcagaagcactggccggtcttgtttctgacgaagaattaaatgatgattttattatgcctgaggcatttgacccgcgtgttgccgctgttgtcagcgaagctgtaaagtcacatatttaatatgagatactattcactcaacagatactgccgcgatacattcggtgaaaagctttacaagctctctctagatggaggcatgacctgtccaaaccgtgatggcacactctcatcgcttggatgcctgtactgcagtgccggtggctccggtgattttgcggcggaccgcagcctttccataaaggagcagctgtctgccgctaaggaaaaggttgcttcaaagagcagctgtgagcactttatcgcatattttcaggcttttaccaacacatatgcgccggtagattatctgcggcgcatattttatgaggctatagaagatccatctgtcgctgtgctgtccatcggcacaagaacagattgtttttctaccgaaatatatgatctgctctcagaattaaacgaaataaagcccgtctgggttgagctgggtcttcagaccattcaccggtctactcttgatgccatgaatacacatacatgtgttgaggatttcatcattgtaacggatgagcttagacgccgtggcataaaggttattgcacatctcatactcgggcttcctcatgagacacgcggcatgatgcttgaatcagttgattttgttgctaaaagcggtattttcggagttaagcttcaactgctgcatgtgctaaagggcacaccactggctgatatgtatattaaacagccatttgagctttttacgctggatgattactgcgattttgtggtagactgtatagaaagacttccaaaggatatggttatccaccgcatgaccggtgatggaccacgttctttacttgttgcacctctttggagcacagataaaaaacgggttctgaacacaatcaataaaagatttgaagtgcgagacacatatcagggacgattaaacttgttttaaaggagaaaatcatggctgagccatttaccatatataagctgacaattttatacatgctcgacaaagcgggctttccgctgtcaaacacacagatttccaatttctttttggaaaaagaatacaccgactacttccgtgtacaggaggtcatcggcgatttagtaaatgctgatttaattaattttgagtctactcattccaatacacagtacactctgactgctgccggaaaagagactctcggtttcttcaaagacaaaattaccgacggtattgagtccgatgtaaagagcttctttacggacaacaagctcgagttcaggcaggaaaactccattcttgccgactattacaggacaactgaccgcaaatatgcagtacgttgtcaggtgcgctcagagagcaccaccatcatcgacctgactctctcagtcggcacaaaggagcaggccgaggccatctgcagcaactggaagaatcagaacgaggatgtgtacgcatacctcatggatatgctgcttcgatagattattttttagtttttcttacagagtagccgaagcttccgagcttatctccaaagccaaaatactctccgtgcgagtacatcacgaggccggtatcattgatatgaaatttcccggtcccatccatgtatttatcatccactgtcacgccgacgacgtctgctataaacattgtatggctgccgagctcctcgatttttcttaccctgcactcaatatttaccgggctttgtgatattcccactgctgacacatgctgcatcgcaagcggtgtcagatgcagttctttaaatttatccacatccctgccgcttttcactccgcagtagtcgcaggctctaagcagctcctcggtggtcagattaaccacaaactctcccgtttctttaatcatgttataagaaaagcgctccggccttacagatattgaaagcataggcggattggtgcacaccgtccccgcccatgccactgttattatattgttatttccggccttgtcagtgacactcaccatcacagccggcaccgggtttagcatattgcccggcttccagttttgttttcccatatgttaatttatcctttaatttttcttttatatccttttatatccactaattttcctttaggttttccatgctttctttaagccttgcccggtttgcatcctcaagctccgtgagcggcagacgaagtcctcccacatcatatcccaaaagcttcatagcagcctttacaggaatcggattcacctcacaaaacagtgcctctattaaatccaggtatttaagctgaatatcaagtgctgatttaatatttccattaagaaattccatcaccatgtcgtgcactgcagcgggcattacattagacagcactgatatcacaccgattccaccgagtgagagtattgggatgacctggtcatcatttcccgaataaatatcgaggtcatctcctgccaacttctttagctttgcaacctgcgatatattgccacttgcttccttgattcctactatattttcaaaatccctgccaagccttgccgcagtctgtggaagtatattgcagcctgtgcgcgacggtacgttgtacataatgattggaagcccaaccgcccctgctatcgctgcatagtgcgcataaagaccattctgtgtggctttattgtagtaaggtgtgacaacaagcagaccgtctacaccaagcttttcaaccttctgtgaaaaatctatcacattttgtgtgcagttggcaccggttcccgctattacaggaatctgcccggctgtctcgtctaccacacattttattaccgaaagcttttcttcctctgtcattgtggcaggctcaccagtcgtgccacacacgataattgcatcagtgccaccgtctatctgccttctcaccagcgtcctaagcatttcatagtttacactgttatcctcattgaaaggagtaattagcgctactccggcgcccttaaacagagacatatatacctcccaaatacactattttactgaactagtttatactaaactatttaacctatactaaaatattaaagcctgatatcaggattttcttttattatatcagcaattaattctctctcatccatgtgatgctttacaccctttatctcctgataatcctcatggccctttcctgcaagcactatgatatcaccatcattggcattctccatgcagtatctgatagcctccttacggtcaggaattgtcacatactctccatctgccttgtgtacaccctgtaaaatatcattgattatgtccataggctcctcatctcttggattatcggatgtgacaacagtaaggtctgcaagtctcgatgacacctctcccatctcataacggcgtgactttgccctgtttccgccacagccaaacaggcatacaagtctttccggctcatactccttaagagtggtgagaaggctttcaagtgccatcgcattgtgtgcataatcaatcataagggtatatctctttgtaacaggaacaatctctattctgccctttacactcacatgatgaagagcctccccgattgcctttttatccacattgaaatgatggcagatagcaatggctgttagtgaattgtatactgagaatttgcccggcacattgacctccacatcaaaatccagaagccctgatacatggtatttaatgccgagtgctccatgctcctttttaagctcaacattttctgctaccaggttatttgtggacttgtagccgtaagtctccacctggcatgtgtgtcccttcataataccctctaagtgctcatcatctccgttaaagataccaagcctgcactgtctgaataaaaggctcttgcaatgcatatagtctgcaaaatccttgtgctcatgctctccgatgtggtcaggctcaagatttgtaaatacaccaatatcaaaggtaaagcccgatactctgtgaagcatgagagcctgtgatgacacttccataacaactgcatcaaggccttcatccaccatctccttaaacagctcctggactctgtatgactcaggtgtggtatttgctgacggaattctcttgtcaccacatatagactctattgtaccgataagtcctgtctttatgccggctgactcaagaattgactttaccatatatgtggtagtggtcttaccctttgtacctgtaataccgatagtctttattttctcggccggataatcaaaataagctgctgacatacacgcaagtgcaagccttgtatcatctaccttaatatatgtcaccccttcgataggagtcacatctttttcgacaaccactgccgctgcacctttctttaccacatctgggatgaaatcatgcgcatctgacacagctcccgatatgcacacaaataccgatgccttctccaccttgcgcgagtcatacacgagtgtggaaatctctatatctgtgcttcctgctaatactttataatccattctttcaagtaatttttcaagcttcattttattttctcccatattttattatatttttgatatatattttctgttaattttgtttcttaaagatttgtaactattcaaccacagacattcgccaaaccgcacaatacttgtgctttatatgatatcaatttctcctgagaaaacctcagtagcaggtcccgtcataaaaacatgattggtctcaggtatatactcgatagtcagatccccgcctcttagatgcacaagcaccttgttgtcagtctttttgttgagtatacatgccatgacggtcgcacaggttcctgtaccgcaggcccaggtctcagcgctgcccctctcccatactctcattttcgcctcattccttgaaagtatctctacaaactccgtgttggttcgctttggaaacatcttatgattctcaaaaagcggaccgtatttctcaagctcaaaacctgccacatcatcgacaaacactaccgcatgaggatttcccattgaaacacaggtcatgtgccactctctattgcctgctgaaatcggttcatctattaccctgtagtcatcactataagcacttccgtctgctttaacaaccggaatgtccccaggcgtcagaataggctcacccatatccacgcgcacctgtgataccttattttcctcaacatatagtgtaaggtacttgatgcctgctcctgtctcaaccgatatttcagtcttgtcagtaagtttgtggtcatacacgtatttcgccacgcagcgtatgccgtttccgcacatctcggcttccgaaccgtctgcattatatatcctcattctaaaatcggccttgtctgacggacctattgtgattagtccgtctgagcctattccaaaatgcctgtcactgacatatattgacacccttgccgggtcatccagcttctcctcaaaaagatttacatatacataatcatttccacagccgtgcatttttgtaaatttcatagtgatcacctcgttattggttttatattggtaactatattatacagcgcactttcttgtttttctatagcattttgtgcgttttatgttgcgttttgtgctgttatagattatgcttatagtaacatcttattatcaaaggagcatatcatggattcaaattatacaaaagcaggctacctgacggagccttttaaaatatttcatctaagagatgaacacaagctaaatatagatttccattaccatgatttccacaaaattctgattcatctgcacggcaatgtatcctactgcattgagggccgaagctatgagctcaaagaacatgatatcgtgcttgtcaatgccggcgaggttcataagccaatattaaatgacgattcaatttatgaaagaatcattatatatgtgtcacagcagcttattgacgattatgtgagcaaaggctatgatctggcatgctgtttcaagcaggcctatgctaaccagtcacatgtactaagactcgctgcggccaaaggcagtcgtctggctgatacaatcaagggactagactctacacttagagaaaccaatgaatacgcaaatgagctgtaccagaagctcctgtttttagagtttctgatacagctcaatcgtatcactctgcatggcggtatcgaatatattaacacattttcctcaaacaaaaaaattgtagagattttagatttcttaaataaggatttaacaaaccgtataagtattgatgaactggcagataaattctatatgagcaggtatcacctgatgcacaccttcaaggaagaaaccggatgcaccataggttcatatatcacaacaaagcgtctgctgctcgcccgcgatatgattcgcgacggaagcagtgtgtctgccgcctgcgatgcctgtggattcggaagctattcctcatttatccgtgcataccgcaagcaattccattctacccctacaaatacataaaagcttcacgatatatcacaggaagcttttaattatttttagtgctgcattatctctcattaatcacatttataagctcaggtatgagctgcttcttacgcgacactactcccttaagcataattccatccttgctctgtggcagattgtatgctgaagccgctattgacgctgcctctgcaccactgtagatgagatatgtagactcattaagtatatccgtgagcataacaaagagcatatcaagctgtttttccacctgcatcttgtcaagcagaggcaccactctcgcctgtaccttatcgagctctgttctcgaaagagcagaaatctgcgatactccaaatgtataatcccctgaatgaaagattttaaaatcctgatttaatatttcctcttctgtcttgttagcaaagttactgcctgcctcgaacattttctgggcaaactcttctacatctatctgcgcaatctccgccaggataagtgctgtagatttgtcaacctgggtacatgtaggcgaacggaacactagtgtgtcagagagtattgcagcgcacataagccccgccatctgaggagtaacctccacacctttttccatatacatctgatagatgatggttccggtacatccaagcggctgatttctgaaatacacaggccctattgtctcaagagaaccaattcgatgatgatcaattatctcaagaatctcagcctcatcaatgttggccactgcctgtgaggtctcattatgatccacaagtatcacctgttttttccttgcattcattaaatttctgcgtgaaaacatacccacataattttggttttcgtcaagtattgggaaatccctgtgtcggatttttgaaacagtatcacgcacatcatccacataatcatccaaatcaaaatgaataagattttcccttgtcataaatgactttatcggcatactctggtttatcagacgcgatgtggtaaacgtgtcatatggtgtacttatcactaccacatccttagcgtttgcagcatttatgacatccttcgatatatcgaagccgcttgtcacaatgatacagctgcagtttgcctcaatacatataagctgtgactcttcacggtctgatatgatgaccagatcatcctcagccacattgccctttatggtatcaggtgtacctgctccaactataacctttcctttcacaaaatagccatgctcattgcctgcaactatcttgccatccagcgtctctataatatttctgtactgggtcctcgcctttgccaggatagaattgtcatacacatccatatatgactttgctatatcacctgtcacaataagcccttcaagcttgtccttcttattgacaaccggaagagtgactacgttgagtatcttcatcatctcccatgcctttttcatggatagattactgctgacaccctcagtccttctgatatgtatatcctttatctgtgtgccaacatcctttaaaagggcaggcgtatctgccttaaaataatccagcacaaatgctgtctctgcactgatgctgcctgctctcattggtatgtattccattgtatcatctgtatgtgatttaaggtttgcatacgctattgctgcacagatagaatctgtgtcaggatttttatgcccaacaactcttacaatcttttttgccatttagttttcctctctgtctgccttataaaatgtcaaaatatggtgcaactccctaaccgggaactgcaccaccctattacaataatatttattaaagaatcgaaccaaagaaccccaatatatacaatgcgattgcaacaaaaccaaatgtattgataatagccagcacagtagagatgactgcaaaagtctttgttgttcctacctgcttctcaagctctgacactgtgtccaccttgtctcccattaccttaaagagatcctgaatattcctgaagcacttaacattctctgtatgtaccttgtcagacagctccgcctttaacgaaacaagctgatcattaagctctgtaagcgactgaagcatatgggcattcgcctcatttaccgctgatgtaactgctgctgtgccctcctctgtgatacgccttgtctgctctaatgtgtcaccaaaatcaagactctgacctatattctggctgatgcctgatatctcagtgccaagtgactgtccgagatttccaatctgtccggacatcgaactaccaagattgtccatattggcatttaccgagcgtccaagattatccatatctgagcttacctgacggcctaagctgtccatgcctgcattcatagattgctctatctcagccatcttttcatgaacactttctataagcacatctatctgcttagcaacctgtgcagtgattccatcggctttttcctgtctctcgtcaagtatctgctgcagctcctctgccttagcttccctctcctcaactatggttgaaagctcctctgcttttgattctttcgtattgagcatctcctgaagacgttttgccttttcacgaaactcatcaatttgtgttaacaaaaaatcatctttatccatttgtatattatcctcttttttctgcactctttcactacggttaacatcgtctcttgctacacgggatgccattactgttcttgaaggtactgcccgctccgcttgttctgtagatataaatctttttgcacgtctatcaaatatgcctgacattcgtattcctccgatggttcaattaaataccattaacatatatattgtaccattacatattgtatttgtaaacaaaaaaaccacgaaatatagtgtaatcacaggagaaaaagcaaaaatcccacagggcaaatgccctgtgggataaaatatataccgtgactaatgaattagtcctctccgtataatttaacgagtttctcaaggtgtgtataacgtgccttagctgtctcctcagacttagcaaagagtttctctgctctctctgggaatggcttgataagacgagtataacgtgcctcgttgttaaggaactcctggtaagatccgtcgccggcctttgatgtaagagtgaatggattctttccttcagccttgagtgcagggttgaatgagaagaggttccagtatccagccttaacagccttcttcatctcatcctggcagtggttcataccacccttagcgataccgtgaagctcgcaaggtgcgtatccgatgatgagtgatggtcccggataagcctcagcctctgtgatagccttaacagcctgtgctgggtttgctccaagagcgatctgtgcaacgtatacatatccgtagctcatagcgatctctgaaagtgacttcttgcttgtctctttaccagctgctgcgaactgacatacctcaccgatgttagaagccttagaagcctgtccacctgtgttagagtacatctctgtatcgaataccattacgtttacgttctcgccagaagcaagtacatggtctaatccaccgaaaccgatatcatatgcccatccgtcaccaccgaagatccatacagatttctttccgaggtaatccttcttagcaagtacttctttagatttctcacatccggctgctgctgccttctctaactctgcaataagagctgttgttggctcaacatttgcctttgtgtcatcctttgtctcaaggaacttatctgctgctgccttgaactcagctgtagccttgtctgatgcagcgatctctttaacaagctcgatagcctggtcacggagatatctctgtccaacttccatacctaaaccatgctcagcattatcctcgaagagtgagttagaccaagctggtcccttcttagagttgatatttactgtgtatggtgatgtagctgccgggttaccccagatagaagaacatcctgttgcgttagagatgtacatctgctcaccgaagagctgtgtaataagtctagcataagatgtctcagcacatcctgcacatgagcctgagaactcaaggagtggctggttgaactgtgatcccttaggtgttgtatcaaccattccggcatctgtcttcttagaaacgttagctactaagtaatcaaatactggctgctctgctgcctgagactcctgtggctgcattgagatagctgctgtaggacaaactgtgatacactcaccacatcccatacagtcaagtggagatacgctcattgtatacttgtaagcgcctgcctttggcttcatatcagcaaccttcatgttgtcaggagctgcctttacttcgtcatctgtaagtaagaatggacgaattgtagcgtgagaacatacaaatgcacagttgttacactggatacacttctctggatcccactgtggaactgtaacggctgttcctctcttctcgtatgcagaagcacctgttacatactgtccgtctgccttgtcagcgaatgctgaaactggaaggctgtctccatccatcttagcgattggatcaagaagctcgttaacaagcttaacaacctctggacgtcctgtgcgctctgccttaggagcatctgcctctggattcttccaagactcaggaacctctaccttatgtacagcgtcaacaccggcatcgatagccttgtagttcatctctactactgcatcacccttctttgagtatgacttcttagcagcagccttcatgtactctacagccttatcgataggcattacgtcagcaagcttgaagaatgcagactggagaattgtgttagttctcttacccattccgatctcgatagccttgtcgatagcgttgattgtgtaaagctgaatgttgttgtcagcgatatatttcttagcgtcagcgttgaggtgatgagcaagctcttcatctgaccactggcagttgatcatgaatactccgcctggcttaacatcctgaaccatcttcatgccctggataacatatgcagggttgtggcatgctacgaagtctgcctggttgatgtagtatgggcttctgattgggttgtcaccaaatctcaagtgagaaattgtaacaccaccagtcttctttgaatcatactggaagtatgcctggatgtatttgtctgtgtggtcaccgatgatctttgtagagttcttgttagcacctacagtaccatctccgccgagaccccagaacttgcactcttttgtaccaggtgcagatgtgataggagctggcttaacctctggaagtgaaagatttgtaacatcatccacgattccaattgtaaatctgtgcttaggagcatccttctcaagctctgtatatacagcaaatactgaagaaggtggtgtatccttagatcctaatccgtaacgtccgcctactaatacaacatcgttcattcctgcttcatgaagtgttgtagcaacgtctaagtataatggctcaccaagtgatcctggctcttttgtacggtctaatacagcgatcttctttgctgtctttggaatagcattaagaagagcctctgaagaccatggacggtaaagacgtaccttaataagtccgactttctctccctttgctgttaagtaatcaattacttcctcagctacatcattgatagaacccatagcgatgattacacgatctgcgtcaggtgctccgtagtagttgaataatttgtaatctgtaccaagcttagcattaaccttgtccatgtacttctcaacaactgctggaagctcatcatagaacttgttacatgcctctctatgctggaagaagatatctccgttctcgtgtgatccacgagctgctggatgctctgggttaagagcgtgtgctctgaattctgcaactgcatccattggacacatctctttgagatcttcataatcccacttctcgatcttctgaatctcatgagaagtacggaatccatcgaagaagttgatgaatggaacctttccctcaagtgctgcacagtgtgcaaccggtgaaagatccataacctcctgtggatttgtctcacaaagcattgcgaaaccagtctgacgacaagcatatacatcactgtgatcaccgaaaatattcagtgcatgtgaagatactgtacgagctgatacgtcaaatacgcaaggaagattctcacctgcgattttgtacatattagggatcataagtaaaagtccctgtgaagctgtaaatgttgtagtaagtgcaccagctgcaagagatccgtgaactgtaccagcggcacctgcctcagactccatctcaactacctttacagtgcttccgaaaatgttcttctgtcctgctgctgaccactgatcaactgtatcagccattgggctagaaggtgtgataggatagattccggcaacctctgtgtaggcatatgctacatgagcggcagcggtatttccatccatcgactgttttgctctagacatgatatttcctcctgtaaaataaatgttcaattatagacatgaatcagaatgtctctacataatagtttagtttgtgcgctgtaaaaaatcaagtttttttagcaatacattgtacaaaaaccctaaaatatttattaacaaggtaaaatttatgtacaaaagggcacaatggctataaatcgcctgtaaaacacttgcaaaatactggttttacgttaaaatagaaacgatgtgttacagaaacgaacaggttattaaataggaaaggattgaataaagacaaaatgattagtgcaaacaatattacattaagaattggtaaaaaagctttatttgaggatgtcaacataaaattcacagagggaaactgctacggacttattggtgcaaacggtgccggcaagtctacatttttaaagattctctcaggacagcttgagcctacaagcggtgatatcgcaatcactccgggacagagactgtcattcttacagcaggatcacttcaagtacgatgagtttacagtacttgatacggttatcatgggtaataagcgtctctatgatatcatgaaggagaaggaagccatctatatgaaggaggatttctcagacgaggacggaatccgtgccagcgagcttgaggctgagtttgccgatatggacggctggaatgctgagtcggatgcagctactctcttaaacggtctcggtgtatctactgatgatcactacactctgatggcagatctgccgggtgcagtaaaggtcaaggtgcttcttgctcaggcactgtttggaaatcctgacatactgcttctcgatgagcctaccaaccacttagacctcgatgccatctcatggcttgaggaattcctcatcaatttcgagaatacggtcatcgttgtatcccatgacagatacttcctcaacaaggtctgcacgaacatcgccgacatggattacggtaagatccagctctacgcaggaaactatgatttctggtatgaatcaagccagcttattgtccgtcagatgaaggaagcaaacaaaaagaaagaggaaaaaatcaaggagctgcaggaatttatccagcgtttctctgcaaatgcctctaaatcaaagcaggctacatcaagaaagcgtgccctagaaaaaatccagcttgatgaaatacgtccatcaagccgtaaatacccatacattgatttccgtcctgagcgtgaaatcggaaacgatgtgctctttgtcgagggtatttcaaaaaccatcgacggtgtaaaggtacttgacaatatctcattcactgtcaaccacgatgacaaaattgcatttgtcggaggaaacgagcttgcaaaaacaactatgtttaaaatccttgccggagagcttgagcctgacgagggctcatataaatggggtgtcacaaccagccagtcatacttcccaaaggacaataccacaatctttgatactgatgagctaatcgttgactggctcacacagtactcagaaatcaaggacgccacatatgtgcgaggtttccttggccgtatgctctttgccggtgaggatggagtaaagaaaatgcgtgtactctccggaggagaaaaggttcgtgtactgctctcccgcatgatgatcatgggaagcaatgtactcatgttcgatgagcctacagaccacctcgacatggagtcaataacagcattaaacaacggaatgataaaattcccgggagtaatcctctttgcctgccgtgaccaccaggtagtccagacaaccgccaaccgaatcatagaattcctgccaaacggttcaatgatcgacaagatcacaacctacgacgaatatcttgagagcgatgagatggcacgtaagcgtcaggtctactcaatgagcgaggacgatgaaaacgacaactaaacgctaattaattaaaaagaagcatcccaatccgggatgcttcttttattaagccgtaaagtaaggtgggtgatttcctgcctgtctttgactataaaaacatattataattatatccactgttataggcctgtgtataccttccattggcgccatacgtgttagtcttttctgcctcattctttgcggcatactcaagcattgaagccttgcttgccactgcgtaagcataagagccattccccttaaaaagtgcatcaaccttagtcgaatcagcctttttaaatgtatcctcgtcaacagacagcttgccggacttggaatccactgtgattcccaccttcgcaagcgactttgaattgatatctgtaagtgacttcatagactcaagatttctcgaaatctgctttgtctcggaatcatccgcagcattaatgaggctgttgtaatcagacacaaaagctgacaccttcttgtacgtagcatctgtatcgtccttgcggctgtttttgtaaagagcctgcgccgactttaccatgtcctctgactccgactcaatggacgcaagtgtcttcgctgaatccttagatgtagaaacagatgatgagacaagagactgggcctttgaattaaggttatttccataatatgacttgagaagcttgaaatagctgccacttctaatgccgctatatgtagtcatatccatattggcaataaaagacgatgctgcattgttgcttctactgctgctaaagccggaaaacagtgtggatatggatgacgaatcccacattcctattcctctcatagtatcactcctttgataatcatgtaatccgttaccttctatatatttttaatatagacgcttttccaatttatgtcaagataatatctgtcggtattacccagcccggtattactaacatatgagccggtattgtcgtcctttatatatcctctatctgccagtcaacaggctccactccatgctccttaagaaactcattggctttactaaaatgcttgcaaccaaaaaagcctctgtaagccgacagcgggcttggatgcggtgctgtcaatatcagatgctttggatttgtaagcataggaatcttcgactgcgccggacgcccccagagcatatatactataggtctgtcctgctcatttacagcctctatgattgcatccgtgaacttctcccagccgtgtccctgatgcgagttggcctgatgagccctgacggtgagcaccgtattcaatagcaaaactccctgatcagcccatttcttcaggtatccgttattggggatatcacaccctaaatcgtcgtgcagttccttgtagatattctgcagtgatggtggaatatccttctgagacggaagcactgaaaacgacaatccatgcgcctgattgacattgtggtacggatcctgtccgaggatgagcaccttcaccttgtcaagtggcgtaaaatgcatggcattaaatatgtcatctgccggaggatataccacatgtgtggcatattcatctctcacaaaattgtacaaatccctataatacggttttttaaactcggctcccacagcctttgcccactcgccgtcaagcatactcataatctttatctcccgcctatcttctgaccgacacacctttatctgccagataattctttaaatccataatttcaagctccttgtagtggaaaagtgaagctgcaagcgctgcgtccgcttttccttctgtcagagcctcgtaaaaatgctcctttgtgcctgcaccgcccgatgcgataaccggaacagaaacattatcggcaataagccttgtaagctcgatatcgtagccatcctttgtgccgtcacaatccatgcttgtaagaaggatttctcccgctccaagctcatttgccttaacagcccactcaatggcatcaagacctgtatctatgcgtcctccgttcttgtatacattccagccgcttccatcagcacgacgtcttgcatcgattgccacaaccacacactgactgccaaacttgtcagccgcatcacttatgagccgaggggtatttatagcacttgaatttattgaaatcttgtccgcaccctctctaagcagtgccttaaaatcatcgactgttctgatgccaccgcccaccgtgaacggtataaacaccttttcagcgacctttctgaccatatccacaacagtatttctgttgtcgcttgacgccgtaatatccagaaaaaccacctcatctgcacctgccttatcataagcagccgcaatctcaaccgggtcacctgcatctcttaaattgacaaagtttatgcccttcacaacacgtccgttattcacatccagacatgggattattctcttcgtaaacatattatgcctcacctatccctgcaaaatttttaagtatcgaaagtccgactgtgctgctcttttccggatggaactggcaggcgaacacattgtttttctctacagacgcatgaatgtgtgtgctgtactctgtcgttgctgtgacaattgcttcatcagcggcttccagatagtacgaatgcacaaaatatacatacggatgctctgaaagacctttaaacagccttccattgttctgtaaatcaagtgaattccagcctatgtgaggtattttaagtccttccttatctggtatgcgaagtatctgtccgtcaagcacatgaagcccctcaacgccctgactctcatcgcttccctcaaataatagctgaagtcccaggcatatgccaagaaatggcttgtccatgtcacaaacctcgtgaatcaccttgtccagctcgtattttttaagcgaattcattgcatctccaaaagctcctactccgggaagtattaccttatcggcatttaaaatctcatgcctgtctctggtcacaatactctcctcgcctatagctgtaagagccttttccacacttcgcaggttgcctgctccataatcgatgattgcaatcatatcattttgtctcctctttaatgcctaattcatttaatttctgtgtcagtgccagtgtatagtcatctctatcatctatattatatagagcaatggcatcatcatatgataagccatactgactgctcagggtatcagaaataatgtttttaagctgctcaagctgcagctcacatccgtattcctttgcattgtctgcatttacagcacatcgtcctgccgcacatactaaggaatccgctgccatggttacatagcctgaatcgctaaagctcttataggcatcatacttacctgacactgatgcaagcaccgacagcttattgtacaactgcttatcgtcacccgaaagcttcaagccgctcagcctgctgtaggcatttgtatacagttctattgaatcagctttattctgtcccagatcagctattgcctgattgtacgtattctgagcatcagtcactttggagttgtttccgagcaaaaaggtgcatatgagaacaaacacaactatcgacataacaaatacccagattactataacagatcccttaggaagcttaggtcccttctcccatccaatgcgttccttcttttcctttggagcctttggctttttttcttttttaggtttttttggcttcttttcttttttaggctttttgcccttctttggcttatctgtggcttcgtttagctctccgtcagcatccagcgcttcaagtatctgcttattctcatctgagagtgtctttgcgtcagtttctgcaccttctgctgtgctctgtatatctgtgacatcatctgactgcggctcttttgtaaaaaatgatattattctttttaaaaggctctttttttcagtatcttgtgcatcaactgctgcatcagccgtctcgtgcactttcatctggctgcttgcataatcatctatatcagcccctgtctcaccggtttttccttcaagcagatcaccgatattatccagaccatcactacccagtatgtcaagtatatcctttgatgcatttcctgccaaatccggctctcctatttcttcaaccatctgaggttcatttgttattatactctccggagtctcctcctgtttgggattctcagccatttccggcatgtttgcatccatcatctctatcccagaatctgccggtgtaaaattaaataccgcatcgcttagattattgtctgctttgttttcctgtttatctccctgagtctcctgttccttcatcctgcggtcaaactcagtgagcatatcatcaagtgaagcatccttgtcatcaggagccggagtctgtacattaagagcctgacccttggcctgctcattttccctttcaagttccttttcaaagttcgacagatactcatcatatgtctcattttcaagctcgtcctcaaactttttgaggaattcatcctgatcagccccagacatcttcgtatctgtatcctgcagcttattcattgaatccagcaaattgtccagatagttttctgtcgatttatcgctcattagtattctccatctataatccattaaagggtgcagctaaacaagccacaccccttgtatctaaatatattatgctttatcaatcagcttgtcaatcgcctctacaagctttccgatttcaggctttgtaagctgtgcgtctgctccaagctgttcaccctttttcctcatctcttcatttaccagtgaagagaatatgataaccggtatatctctaagctctgcatctgattttacaagctttgtgagtctgtgtccatccatgagtggcatctcaatatcagttataatgcagtcaagatgctttgtaatatcgccctttgcctgcatagcctctatcacatcccaggcctcctgaccattctcttccactatgagattggtatatcccgacttcttaaggcactcggtgatgagctttgacaataaagccgaatcctctgcgataagaattgtagcatcactcctatctcttgcctccatctcatcgatatcattaaccctaagtcctgtctgtggactaatagaagcaactatagcctcaaaatcaaggataactataagcctgtcatccattttgataacacctgtagcagtgctgccatgctcgcccgtcagtgtctcgtcaggctttatgatattctcccacgatacgcggtgtataccgataacctgatctacatgaaatgccacattgagtttgttaaaattcgtaatgataaataagcctttttcatccgtctgtggcagattaagacaattctttaaattgataaccgtaatcattgtgtcacgtggcataaatattccctcaacactcggatgagtattcggaacaggagtgaccggcatatattgcaaaatctctctgatctttgcgacattgattccgtagtgattgtctcccaacgtgaattcaagcacttcaagctcgtttgttcctgactccaataatatgttcgtatccataatacaacctccacctcttagtaatctaagtatatcatatgttttataattcaatcaaacttttttcgttatcttttataaccgacatcttaatattgtcacatgccgtaccctgaggtatcttgaaaagcagcaccacatcaaccgcatcgtgcgcctttacggttccctgaaaagtattaagggaatatgtaaggaatgtgccctcagccgtgtattcctttccatcggggaaagttgctttatatgtcctggcattgccaaacatatcaacatttatatcctcgtctgtcggatttttaagagtgaatttcataaccgcaaaagtattaccgcttcctgccgttatagaatagtatgagccctcattgtacacatctgactcgtttactccatcatatgtaatttcaaggctgccgtagcctgttgcctcggcaagtgacaccttcttttcctgcgtggcagaaggctctttctgcgaattgctgctcttatcatttccagcttcagatgtcttattatcctgcgaaagtgaattatcaggtgacgcctcgtccactttctcagtgtcgtcagcatcctccatatccccacgtttctccgtagcgttagtcatgccatcctgctggtatatattgtgttttgcaacaacatatgctgaataattagcgataaggccttgttccgcatcagtcatatcatataattttgttccgcagcctgtcaacgttataattgctgtaaatgccacagctgccatttttatatttcttcccatcattgcaataaacccgttcttattctatgacttttatcctaataatatatatagtaacacatttattgattgtttgcaataaataactcaagttcaaaccagaattctacaccatccttgtgatttatgacaccataccctctgtgatgcagttccataatggcctttactatagacagtcctatgccgcttccgccatattcccttgttctggccttgtccaccttataaaacttattccatatattttctatatccttatcaggtatcggctctcccgtgttaaacacgctgaccctcacacggtcgctgtacatgctgtatgatacagtgatagtaccacctcttgtgcagtgatttatcgcattgctgatatagtttgtcacaacctcttcaatcttgtatatatcaccgctcacatatacggaatcggtgcggtcaaactcaattgcagcctcatttttctgtgccagaagcctagatgaatctataacccctctgacaagcggtgtcagatcaaacctcgtcatctcaagcacatcactgccatcctccagatgattgagagataaaagcttcataaccatgcggttcatcttgtcagtctcgtccatgatgacatcacagtagaagttacggctctcatcatcgtcatttacgacctctttgagcccctcagcatagcctgagatcagagcaagcggagtttttaactcatgtgacacatttgacaaaaactcctttctcatctcatcaatctcttcttttttctttatatcacgctgtaattcattgtttgccacctttagtcttgtgatggtctgctcaagtgtctgcgacagctcattcatatgctcaccaagcacataaagctcctttgcactgttttccgtatcaatgtacttcgcatcaaaatcaagcttcgccatccttgtcgacagctcagtcatatttcttatcggcctggtcatgttgcgagcaacaatatatgccataaacactcccacaacaatagcagccactgtgcctattgcaaaaaagcggttcgatatggacacgctctccttaatgctctcaagcggtgtcttcatgtatacaaagttaccgtcaatcagtctgttatttatgatgatatactctgtccccagccttttatccttctgccttgtcatattcaggttgttgtagtctgccgaatacgacgacatgcttgcctccaaaagcagctggaatatttcctgattgtcagtggttccctcaatgatgaccttaccgtatttgttgaacacaaccgcatctatattggcgccaacgcatttcttttcaaatgctacagcaaacgtatcatctgaaagtttatcattttttgcagccaggtccaccattttgtataccgcaagcatctctttttccttgttatatacataatacttttccagcagtgtgttattagccatccagaacacgcctactatcagaagtacaatgaatgaaatcacaaacgtaagctgcgtggatagcgtttttttctttttcatggtgacacctcttatcccgaatccattagtcctaagcttaacacttactgtatctcgaacttatatcccacaccccagacagtctttatatagtcgcctttagcgcccatcttgcttcttaatttcttcacatgtgtatcaatagtcctcgcatcgccaaaataatcatagctccacacactatcaagtatgcgctccctggtaagagcaatcccctgattgctcataaagtaatccaaaagctcaaattcctttaccgaaagttcaatattcctgccatcaatagctacagtgtgcgccgtcttgtccataacaataccaccggcctcgcttattactgcctccttgcccagtttattcgccctgcgaaggagagcatttaccctggccaccagtatctttggagaaaatggctttgaaatgtactcatcagcaccaatgtcaaagccgtttaattcgtcacgctcatcgcccttagctgtaagcataataatcggcacctttgaagtctgtctgatttcacggcatacctccaaaccatttatccttggcatcattatatcgagcaccagcagtgctatgtccttctgctgataaaatatatcaagtgcctcctcgccgtctccggcctcaagtacctcgtacccttcccttgcaagaaaatcatgcacgagctttctcatcctgctctcgtcatctaccaccagtatctttattttgtccactctgttgcatcctgcctttcattcagtgctttttccctctcttctactgccttttcccttttttcaagctccttctgccagttttcatatttgtctatcagctcattctcgtagtccaccacatacggactgtgtccactcacatatgtgatgccaaacataacagctatggcagccgataatacaatagtaaaaaacaatgccacatggaactttttcttatagccttccgtctgtttttttacctcgacaaccgcttttttatcctcaggaatataaatcggacggatatcctcattcttgatatatgggattgtatgcagatattcctgcagttcaacaagaaacgatagccctacaggagtaaaaaaataccccggcttattaagccttaaatacagcttgtataccgtatccgggtcagacatatcagtctgatcctttatatatcgtattccgtcactttcttttttagcctgccttgcctcttcctttgtctgaaactcaaacccatcaactacatacatcatattccctctttctaatcatcgcgctctgcaatctcacccgaacgatatgccgcaatgagatgctttagatcagctatcttttccttcatctttattccggcatccgtatctccgacaagtattctcttatcaagtacctctacagcctcacgccttgatacgatatccctctcatcccttactgccgtctccggtgattcaaacggctcatgtgctgtcaatgtcagcccatatgaattgtaaatcaaggtatatcccgcgatgcctgtccgcctgcggtacgcctttgaaaaaccaccatctatgactatcactctgccgtcgcacttcacagggctttcacctcttaatctgtgcacaggaacatgtccgtttatgatatggtctcttttatcatgcaaaccaaactcctcgagtatacgctgcgcacactcaggcttgtttatatactcataataaaagtttttcttttctattttcatatcatcgtcatctataaaatatctctcaaacgtagccatcttatttctgccataaagcggagaatatggtgctgtccatatgtaccacatgatatcgctgcccttttgtctttccagcctgtcgtccgagaaaaaagcctttctgacgtaagtctccagtatatcaaacaaagccttgccactatactctttaccgtagatatttacctttgcgaagcttccatcctcctccatcgggatgcatccgtggaaaagcagattgccattatataccttgtacatgctgccttttttaagcagcagcccaacgtggtttttaagcttctcgcaatgaataaacgagctcctgagcctctgtatgacttcctcttccccctctgtcagcctgtaaggatcagccgggtcaattgtcggaaagcttgtatcaagaagcttataagttctgccctcaagctctatagtgccctgttcataatcaatatgttccaaaagcaatcgttccttcatgccatactcaggccacttcttaatgagctgtccctccagcttgaaacgtatgatggcaatggccttgtgcatcttctttatcagatcactctccatattatctgcaccacttggagccaccttaaacacaaatctggtgcatgggtcatccttgtaagccttcagtgcaaacgtagcaagcggaagcatatttatgccatagccctcctcgaccacgtccagattaccatatctgatactgtttctgacaacagttgcaatacatgcaggatttcctgctgctgcccccatccagataatatcgtgattgccccactgtatatccagcgagtgatatctgcacagcctgtccattatcagatgtggccccgctcccctgtcatatatatcaccaagcacatgcagatggtcaacagcaagtctctgaataagctctgaaagcaccactataaactcctccgcagtgcccagctccactgttgtattgatgattgactcgtagtaagcctccttgtttaacacttccggcttttctgtgatgagctcctctataacatatgcatactcctccggcaaagcttttctcaccttggagcgcgtatactttgatgaaacggtcttgcacacctctatcagcttataaagagtcgtcttataccacgaatccatatccggctcgtcctgcttaataagctccatcttttcccttgggtagtagatgagtgttgcaagcgcagccttgtcagccttgttcatcgccagaccaaatacatcatctatcttctttcttacagccccagaaccatttttcagcacatgggaaaaggcttcatactcaccatgcacatcagatacaaagtgctctgtgccctttggcaggtttaaaatagcctgcagattgataatctcagatgatgccttgcctattgtcggatacatctccgacaactgttccaaatagtgtaagtgttctttatcaattgctatatcattcatttatatctagacctcataatactgattcatcaccttatttatttccttttcaagcttacaacccgtgtatacacacttcataatgcactttctgattggctcctcaaaattagtaccctcgcacttatccaaaactccctgcaatgtaagctgtacaagtatgctctcacctgtctgcggatctgtggctatgttttcgtacaccttcttgtagtacttatcactcactaccgggtagtcagtcagcgccatttcccgccactttctaaaacttagcgacatatattcacctgctcttttgtatataataaaacattgtaccaattagcggtgctctaatcaatgcctcagacacatttatttcaaaaaagttttttgatatttattataaataaagctgcatttgtttaaataaaaaaagtgtaagctgcattcagcttacactaattaagtttcaggacacctccctttttatataacaaacattctaatttgacagtaattgacgtttcttatatatttatttatgtttcaacaataaccattatagtttattgtgcatgtcaatacttgaccaaatttggagtttatttttttaaaaagaagggagattagctcataaatgaaccgacttgaaatagcaaacaacatatcgacgaatattgagcgcgaacgcataaagcttggtatgtcccaggcacagtttgcaaaagcacttgatatgtcactctccacctacaagcgaatagcaaacggagaatcctctcgtatagacatctacaccgcttaccggatatacaagctgacaggacggttttcctacgaactaacaggcttcaatgatgatgtaataaaccttgcaaagcgcatcaaaaagctttccaaaagccagcgcatacttatagactcgattatagacactgagcttgcgctgtctgcctacaaggatgaaagcagtcataaggaggatctgatttccgtcctcatcccgacaggcaatatgaccgacggcatgatttttgactcctacaatgtcgaaaagcttgatgtttcaaattacagaaaagccttcggtgatgcccttcacatcggaatccgcatcacaagcaatcatctacatcctgtatataataaaggcgatatacttctaatcagtcgaaacccaatccgcgacggcgataccggtatctttatcaacgcacagaacaagcgtgcatacatcagaaaactccaccagaaaaccccatgtgagctcacaccaatcaacaattacggtgagaccttttatgtcgacagcgataacgttgatgatatgagcaaatggataaaattcggacacgtgctctgcaaggtgcgctagcagtttactctgttattttaatatcatcaaagcagtcaaaggttgcaaagtagtctgccggagtttctgctcttctgatgagttttgcctctccattgctttcgagcagtatctctgctgagcgaagtcgtccgttataattgtagcccatcgagaagccgtgtgctcctgtatcatggattaccagatagtctcccatatcaatcttcggaagctgtctgtcaattgcaaacttatcacagttctcacagagtgagcctaccacatcatatgtatggtcacaaggagcatcctccttgccgagcacggtgatatgatgatatgagccgtaaatagccggtctcataaggtttgccgcacacgcatctactcctatatactccttgtagatatgcttctcatggatagcctttgtcacaagacagccataaggagccatcataaaacgtcccatctctgtgtaaatagccacatcgcccattcctgccggtaccaaaacctcatcgtacaccttatgtacaccggcgccgataactgatatatcgtttggtgtctgatccggcttataagccacgccaactccacctgaaagatttacaaatctaatatcgcagccggtctcatttttaagctcaacaaccagctcaaaaagctcctttgcaagctgtggataatactcgttggttactgtattgcttgccaggaatgcatgcacgccaaagtatttagcgccttttgacttaagaattttgaatgcctcaaaaagctgttcctttgtcatgccatacttggagtctcccggattgtccatgataccgtttgacagtgtgaacactccgcccggattatatctgcagcttattgtctccggaatatgtccgattgtttcctccaaaaaatcaatatgtgtgaaatcatcgagattgatgatagcaccaagcttgtctgcatatgcaaattcctctgccggtgtatcatttgatgaaaacatgatatgctctccgtcgaagccgcatgactttgcaagcataagctctgtgtatgatgagcagtcacagcccatgtcataatcctttaaaatcttgagcagatatgggtttggagtagcctttacagcaaaatactctctaaaacccggattccatgcaaatgcatcctttacagcctgcgcgttggcacggatgccagcctcgtcatataaatgaaatggtgtagggaattttttaacaatctcctctacctgttgttttgtcacaaatggtgtctttttcatgtttatctcctaacttttacatagtaaagtgtactaaaacatatgctacaacaaaatgggtatattttcaagaatttttatggtataatttcttattaggtaaatgtctttacttttttaagtatagctgatataactattcaaaactgatataactatttaaattaagatacaatgggaaacaggaaaatgaacattaaagtacttcagtatattgataatacacaaaaaaataatataactaccagtcaggctgctgtaaccggtgataacattccttccaaaatcagctccgctgtcaatagcaccggtactgattttgatcaggtgcttgacgatgcaaaaatggctgaagctgctgttgccattgacagactgattgcccaaagtaacggtggctcagttgatatgtcacttgtacagaggttctttgatcaaaatggtataaatatcgagctttgccgtaatacagtttctccttctgccgcagttaataatacagctgcttattccggttctccagcaataaacagaggctctgtaaagcttgaagcttccggtttgtcatgttctgccgatcttgatgcaatttttaatgaggctgcctcaaaatacggtgtggatgccaaatttcttaaggctatcgccaagtgcgagtctgacttctccacagagtgcacaagccgttcaggtgccatgggtatcatgcagctcatgccacagactgctgcctcacttggtgtcacaaacgcctacgacccataccaaaatatcatgggtggcgccaggtacataagcgaaaagctcacccagtataatggtgacaaatcactggccttagctgcctacaatgcaggctccggcaacgtagccaaatatggcggcatcccgccatttaaagaaactcagaactatgtagcaaaggttatggcatactataattcataataaattgtattctgactcacataaaattatattttaattcaaagtggcttgacaaatgctgatgtatatagtaaacttaacaagttgatagttgctgatgtggctcagaggtagagcacttccttggtaaggaaggggtcacgggttcaattcccgtcatcagcttatttaaagaaaaccccgaaactcaagatttcccagtaaaatcaagagtttcggggttttttgtacttcatttttcaaatttagttattttatacattgaatgccacagacataaagcctgtggcattcaatatatatgaggaaaagcatatgcgacgtcaattcagtgcacatgaataatttttagtcggaactgagtgtaccccaacgcatagttgaaatacaacagctccttttgatgatattatagtaacacttaattgtgtcctaaatatagccatgtgataaatattttcttaaatttggtaaatatttacaaacaaactcttaatccggcagaaatattctatatttcaacaatatatttctcgtacgcattgataacagtagtttctcccaccttgtcaagcctgacaaactgcctgccgtaactcatatgaacatgtccatgcacaaaataccttggcttatactgctcaataagcctgttaaacacatcaaagcctgtatgacatgtatcctcaccatcatgcagtccctttgccggcgaatgagtgacaagcacatcaaagccgtttttacgtttaagcttccaccacagcttcttaacacgctttgtcatctccttctgagtatactgattttttcccggtttatagcggtttgagcctcccaggccaagaaaccgtacaccctcatattcgtaaatctcatcctcaatgcatatgcagccttccggcggctttacattgtatttgtcatcgtgattgccatgcacatacaaaagagggactccaaccatcgttgtcagaaaggacagatagctcgggtttaagtctccacatgatacaataatatcaattcctttaaaatcctctttcttaaagtattcccagtacattttcgactcttcatcagctaagaatagtatcttcattacagtttattttcctctacaccctttagttcaaccaccgtctttgcattgtcaacaaactcactcataggcggaatactacctacaacattatctacaagccagtccattttcatgatatcagacggtttcatctcgtgctcacctttgtttttaagctcgcccttctgattatatatctgtccaaagaacggcacaacctcaccctttgtgatatcgctctttaaatgatccgcaagccttttcactccataaggtacatgctttgaacaaatcaggtcaataacaccggcagacatgccccaccagtaattaagtgccttaacctgctcctgtccttcagccttgtaggagcctgccagtacgctctgcaaaagcttctcataaaacactccccagttccatataggcatggcaaggtttaatgcctggccatcctgcagcttgtacagaccaaaatatctggacgcgtcattcggagtaataatatcctgatccgacacataatgcaggtcattttcttcaaggaatttattcctgtcataatcctttgtctttgaccatgccagatatacctttgcccttggattcacacttgcaactcccagagcaaacgcgttgatatttgcaatcatgccatatatcgggtagtctgcaatatatgcaaccctttcattgtctgtgacagctcctgctatcattcctgcgagaaactttgcctcatacatacgtccatagtatgttctgatataaggatgaggcgcattcagcgaacagttgagtatataaacctccggatgctcaacagccacctttaagctgtttggcatcatctgcggtcccacacaaaaaactatatcggcaccggactttatgatatcttcaagcacctgctccacattgttctcatctacacctgccacatattctgtctccagcttgtctgaaaaggtttcatcaagatacatacgcccaagctcatgcgaatacagccatgcagatgtctttggctctcttggatacaaaaatactaccttgagcttcttttgagtctgaggaataagatagtttaacagactcttttttgtctgtacctttttcggatccagcaccagatttatcttgtgtttttccccttctgctgcaaactccttccatgtattgatgacgtttttgttgtaatcattctcagacatctcaagcatggcatccatgccaaagacctccataaatacggtaatagcatccccaagcttgatgtccagcctgtcaccaccgcggaaattatagacctttgaaaaatcaaacattaccttggcaaatttttccttggtctcatcatcccatctgccctcttttccaacaagcgaaagaagcttatcagcattgcccagcttcgtaaactccaccgagcaaagccccgtgatttcattgaacttcatatactcataataaagcctcacatcataatcatccgacagctttggaatctttctggtcacaattgcaggaatcgaaacggcgttgaagtacttgagtacactgaccctcttattgccctcaagcacataatacctgttcatgtactcaaatgccttgattggatctctgattccctcattcatctgtgcatctgacagattagaccacttcactgcaaattcggtttcctcgtccaatatcggcataaagtttgccgcaaatgaatatgtcctgcccatggtgcttgttcctacaacgaaatccaaaggcacctggaccagccccatatactgctctgtcttaatatctgcctctgataagatttcatcaagtactggcagataaggaaactgtcctttagctatccttgccctgtattctttttttccctgttttaatgcttctgaatattctgtttcacccatatcgtaatctccttttgaaactattttaacataaattttaaaaatttaaacatttcctttgatatttttgaaaactctgatataatatatgttaggaaataggtaccacagctatatggaggataaaataatgcaaaatatatctcgggaaaatgccgatatcataggcgaagtagccaatatctgcataggcaatgcagccacaacactgagcatgattctacagagaccaacaaatattacgactccgattgtagaggttttgaaaaaagaggatgctctcgatcacgatgatcgaattttaattaaggttccttacacaaaaggacttgacggaaccaacctacttattataaaattaaatgatgcattggttattgccaatctcatgatgggaggcgacggaagtaatgtttcagatatgacacttgatgaaatcacactttctgccatatcggaggctatgaaccagatgtgtggtacaatagctacatcaatgtcttcgctcttaaacgagccaaccgacataggctttccgcttattaattcaagttatcagaagacctttgatataccggaagagttatgtaacggaacagatattgtcaaggtgacattcaggctgactgttggagatttaatagacagtgatctcttacaattgtatccaataagcatagtaaaacagattatcaaacaggaggtttaacaacatggctagaattttaatagttgatgatgcagcatttatgagaatgatgctgaaggatatccttacaaagggtggattcgagattgcaggcgaggctgctgacggaaatgaggcagttgcaaagtacaatgagctcaagcctgatcttgtaacacttgacatcactatgccaaataaggatggcatccaggctttaaaggaaattaaagcagctgacccaaacgctacatgcgttatgtgctctgctatgggacagcagtctatggttattgacgctatccagtcaggtgccaaggatttcatcgttaagccatttcaggctgaccgtgttatcgagtcaatcagaaaagtacttggataatatttacatacaaaacaaggtctgtcagtatagctgacagaccttgttttattatatttttgtaacttttcagtaccttcacagctgcgcaagactctcaatagccttgtcatcaagaataacctttgcatgctccataagaaaagctcttttgtcagcccctgcaatgatatcatctgcatactcatctgctatgacagacatcttttcaagctcatgctcatcatagcccgataaatccatgctcataaagtactctccctcaaacttaaaaagctgtgagaatggcattggcagtcctttaatcatctttgcaaatctgacagccacatcaaatttttcaaaaatgaacattacaacagacaccatatcctgcttttttgcagttgtcctgccttttttatttttctcattctctgcagcctcagccggcagcgaattaagcagtccattaacgatatccttaagatgctccatcatgccctcagtagcaggatgttcagaaaatgtcagagaaagtgtgtgatccgccaaaaaatctgctctcacagtcttgattcccaaattaaaatcagttccaaactcttctgaagccatgtcaaatatctggttcatgaattcctgggtgcgctcgccattgctcataatttcatccattgtatatcccagatcatatatttcttcttctgaaataacacattttatagtgtgttcacctattcttgaaaactccataacaagcttcacctactttctttttagcttttgtctgatacgggatagtgcattgtcaattgatttgtctgattttccaagcatatgcgctatcgatgtataattatttccttccagatacaattgtagcacttttttctccatattactcagtttattccacaattgttccttaaattccttaaatttttccttctctatgagaagctgctcaggacttgcaatatcatcttgcagcatttcctcaaactctgtaccatcactgtcactctgcgaaaaggatatatatgtgttaagcggcatatgtttctttcggtttgaagcctcaagcgccgagctaagctgccttgtgatgcatagctgtgcaaagctgtagaaagatgcttccttgtcgctcttatagtctctgaccgctttaaacaggccaatcatgccctcctgaataaggtcatcattctcaccgcctatcaggtagagagcattcgtctttttacgcacaagcggcttatacttttccaatatatagtccatgatttcattgttgtcaccatggtcatttttgtcattatgaatcctcataataagctcttcatccgtatatgcgctgtaatcttccactatatgcttcctattctataaatatacaattcataatacacaccactcatcccgcgacatgtaatctactttccactcttaagtctctgtctgactatctcatatgcaagcacgcctgtcgcaaccgatgcgttcagtgagtcgatatctcccaccataggaatagatgctgtcatatcacagttttcctttacaagcttgctcaccccgtcaccctcattgcctattacaagacctataggacctgtgaggtttaagtcatacatggtagtaccacccatatcagcacatacaaaccacatgcccttttccttaagctcctttatggtatttgagatattggtaaccttggcaacaggtgtatagtttatcgcacctgcagacgtctttgccactgtaggtgtaagtcccactgcacgccttttcggtatgataatgccatgtgctcccgcctggtttgcggtacggattattgcaccgagattgtgtggatcctctataccgtcaagtatgatgataaaaggcggctcgccctttctttcggcattttccagtatgtccgaaacctcggcatactcatatgctgccgaaactgcaatgacaccctgatgcttgcctgtctcagacatctgatcaagtctttcctttgcaacatagtttatgattgcatcatgctttctggcctctcttgtgattgactttattggtccgtcctgacagccgtcaagcacaaaaagcttgtctattgtctttcccgaacggaaagcctctagcacagcatttctgccctctatataattctcatgaaatttttctttattgttgttatccatattttcctcttattttgtgctatatttcaattcctaaaagctccactccaagcttagtgagtgaaacaaccctctcaaaatcatccttcagataaagatagcccatgaccgcctcaagccctgtagccttcctgtaatcagccattgtagcgttttttgccatggaaggcgacttggcattgcgccccctgtgatacacatcactctcctcctgcgtcaaatgcggtaaaagtgcctctatcatgagagcctgcgtatgtgcctttactatattacttgtgtgcttatgaagcagatttgcctttgtattgccctttcccaccacaactgagcggatgacaatatcaaatatgccatcaccgatatatgcaagtgtaagcggcgagtatgtccttatatcaacatcctttattccaaactgttccttaatatatgagtctatcttcatactatacaagctcccattttactccctctctggtatcctttatggcaaccccctttgccagaagctcatctcttatggcatcggctgtcgcaaaatcctttgcctttttagcggctgcacgctctgtaattttatcattgataaatgcctcaagctcactgtctacagatgacgatgcctcaagtaatgcctttcctgattccctaaatcccagatcaagtacctgctcaaagtcatcgataagtgcaagctttgtactgtctgagatatcagccttaagcacatcatacactatggttatagccattgatgtattcagatcatttgaaactgcatcagtaaatttcttcttaaagtcagcaaaagctgtctcatcaatatcaccctcatccttaagctctgccacacgctttgcaatcttattgtatgccgcaactgcattgtcgagcgcatcaaacgaaaactcaagaggctttctgtagtgtgactgtaagcagaagaatctgtaggcaagcggattgtagcccttctcctgaagcaccgaaaccgtgaggattgcacccttcgacttgctcatcttgccggctctgtcatttaagtgattgacatggaaccagtacttgcaccagtcgtgtcccagatagctctctgactgtgcaatctcattggtgtgatgtgggaaaatattgtccacaccgccacagtggatatccacgtactctccgagatgcttcatgctgatgcatgagcactctatatgccagcccggatatccgacgccccatgggctgtcccatttaagagcctggtcctcaaacttagactgtgtaaaccagagtacgaaatcatttttattcttcttgtttacatcctcctcgacatcatctcgcactccaacctgaagctgttctttctctactgctgaagaaaacacaaaataatcatcaagctttgatgtatcgaaatatacattgcctcctgcaaaataggcataacccttctcgataagcacctccaccatatggatgaattccggaatacagttggttgcaggctctacgacatcaggcatcctgttgtgtacggctgtaaaatccttgaaaaaagcatctgtgtactcctttgccacctccatgacgctcttgtgttcacgctttgcgccctttagcatcttgtcctctccggtatctccatcacttgagaggtgtcccacatcagtgatattcatgacacgctttacatcatagcccacatagcgaagtgccttctcgagcacatcctccatgatgtatgagcggatatttccgatatgtgcaaaatggtaaactgtaggtccacatgtatacatgccgattttgccgtcaacacgcggaacaacagtatcaatctgtcttgtgagtgtattgtaaaacttgaaattgttctccattatttatatctccttttggatgatttataactatctttttattttagcatgttttccatatatattcaaatcaatcggtctgacagccggtgcagccgctacatccgcctccgacctgcatactagcctcatagagacctgtaagtgaacagattgcctgcgatgcaatcccctcctcgcgacctgtaaacccaagccactcctcggtcgtcgcctttatatttacctgttcctttgcgatttgcagcgtatcagccacattctgctccatctgctcaatatacggacgaagcttcggcttttgtgcaattactgtcgcatctatgttttctatcacatatcctttttttgcaatgaggtctctcacatgctccaaaagcttaagactcgaaataccctcatatgccgggtctgtatccgggaaatgctttccgatatcgccaagtgccgctgcacccaagagtgcatccattatcgcatgcaacagtacatcggcatccgaatggcctaaaagcccgagtgtatgcggaaccttcactcctcctaaaatcaaatctctgccttcaacaagcttgtgcacatcatagcccattcctactctcatatatcgtctctctttctatcagatacaacacctcatgttattgccaactgtcattgctctgtattttggttttttaattatagtataccttatttctcctgttgcgccaagatattattttaagctattttcaaataaaagaccgccccggacaaaccggagcggtctttattaaaattggaatattccattaaatgtcttatgcaagtgctgcagtgatgatagccattgagtaaacctctccagcattacatccacgagaaaggtcattgattggagcattgagtccaagaaggattgggccgtatgcttcgaaattaccaagtctctgtgcaatcttgtatccgatatttcctgcgttgatgtcagggaagataaatgtatttgcatgacccgcaacctcagactgtgggcactttgtgcgggctacacgtggtgcaacggctgcgtcaaactggatttctccctcgattggaagatttggatatttctcttttgccttgtgagctgcgtttctcatcttgtcaacatcctcgccctttcctgagccaagtgttgagtagcttaagaatgcaagctttggatcgataccgaagatcttagcacactctgctgattctcctgcgatttcaacaagctcgtcctctgtaggatggatgtttatagcacagtcgctcattgcaagcacctcattctcacctgttgcagatggacgaacaaggataaagcatgaagatacgattgtgttgccaggctttgtcttgataagctgtaatgccggacgaactgtatctgctgttgagtatgtagctcctccgagaagtgcgtctgcgatacccatctttacaagcattgttccaaagtagttagctgatgaaagaattcccttagcctgctccggtgtaacacccttgctcttacgaagctcgcagaataattcaatcatctcatccatacggtcaaagttcataggatctataatctctgctccacggatattgaaaccgctcttctcagcgcttgcactaatcttctcaggatctccgacaaggataggatgtaagaagttgcttgcaagtaaacgcgaagctgcctcaaggatacgtggatcctctccctctgtaaatacgattttctttgggtctttctttaatatttcgattaactgaccaaatccaaacatgataatatctcctttatgtatattatttattatttaaaactatatctggtttcacaccactgactataatatacttatttttctcgaatatcaataattgttaaaaggttgtcaagatgttcgcgaaaaaatccaatccatgatatttcatggcacaataaaaggaaccggattaatattttccgattccttttataatgatcactatttattcgtttaaggagtatttatcatgaaaaaccgtttactctgcaagtgccttaaatgcctcatcaagatcctcaattatatcatccacattctcagttccgattgaaagacggattgtgtttggcttgatgccctgatctaagagctctgcttcattgcactctgagtgtgtggtagaagccggatgtatagcaagtgacttaacatcagctacgtttgcaagcagtgagaaaagctcaaggttgtcaataaatttctgtgcttcctttgctccacccttaatctcgaatgtaaatatagagccgcctccgttagggaagtatttcttgtaaagctcctgctgctctttatcctctgaaatagatggatgattaaccttctctacgagtggctgatcctttaagtactgaactaccttgagtgcattctcaacatgacgctccacacgaagcgaaagtgtctcaagtccctgaaggaagataaatgaatgaacaggcgaaattgttgctcctgtatcacgaagtaaaattgccctgatatatgtcgcaaatgctgccggtgcgcaatcctttgcaaagcttactccgtggtatgatacgtttggctctacaagccatggccatttatcattctgtgtccagtcgaatttaccgctatcaattataactccaccaattgttgttccgtgtccaccgatgaactttgttgctgagtgaaccacgatatcagcaccgtactcaatcggacggacaagatatggtgtagcaaaggtattatctacgataagtgggattcctgcctcatgagcgatatttgcaattttttcgatatctactacctctgagtttggatttccgagtgtctcgatttcaatagcttttgtattctctttgatggcagccttgattccatcataatcgaatggatctacgaatgtagcctcaattccgtaatcaggaagtgtatgggccaagagattgtatgtaccgccgtagatattctttgctgcaacgatatggtcaccagcgtgtgctactgcctggaaagcatatgtgagtgccgctgctccggaaccaacagcaagtgctgccacgccaccctcgagtgctgcaattcttctctcaaatacatcctctgtagggtttgtcagtctgccgtagatatttcctgcatctctgagtccgaatctgtctgccgcatgctcactgttatggaacacatatgatgaagtaaggtagattggaactgctctcgcatctgtaaccggatcaggtgtttcctgtcctacatgtaactgtaatgtctcaaattttaaatttctgtctgcataatgtttcttgctcatattaatatcctcctattaatgatatgttaatgttatttgtttttaattttaattccgggatgctgttcccttgaactaatcatatcatatcatctttctaggaaaagtgttaatacttataactaagagcttgctataaatatattttataagcaattgttttccaaaacatcagaaagttctctcgtagctgcaccaacgtccatgttatttacagcatagtcacatatctggcgattgcgtttctctgcatctatggacagaatacgcagtgtcttttcttctattgagtaatcctgctctatgatatcccggattaaaagctccttatcacgtgccacatacactataacagtaggaaaatgacgcttcatggcaatggcgccgcacatgtcaagcggcatcacgacaaagtgtccctttgcaagcaccgcctctatatcctccattttggtgccatactgtattcctgcgtatcttgtcttttcaaagaaatcctgtgcattgaactcctcctccgtcaggtacctgtgcttatctccgggcttggtacagtaggttttcggattctcaaactgctccatggcgcacaggctgtctgagagtgctgtctttcccgagcctgatggtccgacaagcgccacaactgacggattctttatatttttatttctatataatgatgcatttattatctgctccacgagatatacaaactctgtgatattattaacagataaaagtcctgtcatttttgaattccacggctttcgcatgagcacaggatatgtggccggtgtctcaagcacattgtgtatggcatcatctaaaataatatcaaactgcacaagattttttgcattgccaagtatgatattttctgtcgggaaatcaggaaatgcctccattatctggctcgccctcactcccatgaagcccggtgccaccgcagtgataaaatagacctctccgatatccatgagctttcttatcatccgctttgtctcttccgtaggcttctgcctctcgtaaagtgtattatcccggtaaaattcctttatgacagaggctctgccggtattctcccaggaatctatatcctccagttcaagcggtggggtgatattatattttttgtttgccatatctatggctatactgttgaatggggctgtcacatcatcccagtcaagtcctattttaggtcttatcatgcttatccctttctgtttcgtaactatttataacaaaaagacctgcaacaactgcaagtcttaacaagtagcgagggagagactcgaactctcaacctcccgggtatgaaccggacgctctagccagttgagccacctcgccatatttgattgatacctttaaaaggatgggacctacagggctcgaacctgtgaccctctgcttgtaaggcagatgctctcccagctgagctaagatcccgtgtcacttctgttgaagtaaagtagcgagggagagactcgaactctcaacctcccgggtatgaaccggacgctctagccagttgagccacctcgccatattgattgatatcctttaaaaggatgggacctacagggctcgaacctgtgaccctctgcttgtaaggcagatgctctcccagctgagctaagatcccatgtcgtcaaccgacttgattattatatacagtcggcaccttattgtcaacaacttttttcattttatttaaaaaatttttaactattcagaagtctctccacaagcttcacgcactctgccgcatcctttgaatatccgtcggctcctatctcgtctgcaaagctctgtgtaatgcaggctccaccgattacaaccttgctcttacagcccttttccttacatatttccactacatccttcatgcgcatcatggtggtggtcataagagctgacagtccgataactgccgcattcgtctcaatcgccttgttgacaatatcctcacaaggcacatcctttcccatatcaatcacgttgtagccatagtttttaagcataagcacgacaagattctttcctatatcatggatatcgccctccaccgttgcaatgacaagagtcggcatatcctcccctgaatctttcttctcaagcagtggttcgagatattctatagcaagcttcatggtatttgcgctgccgataagctgtggcaggaaatatttcttctggttgaaaagctctcccacctcattaatagccggaatcaggctgttattaataatctcgtcaggctttgccccatcagaaagcattttctttacttcatcaattatactgcccttgtttccctttaagacagcctgaaataccgcatccttactgcccgctgcgcatgtgccgtttgaagcagacgcatcattgtccgactttttcacaacaacagtctcatattgggccttttcctccgcaagtctgctcatgcgctcgatgtatgctatatcgctgtcaggtctgtcgagcagcatatcagatgcaaatgcagcattcatcaaaagctcctgtgatggattggcaatagccatggtgagtcccttgcatatggccattgtaagaaacgctgtgttcacgtacatacgctcaggcagtccgaaggatatatttgaaagtccgcatattgtaggaagctttttctcatccttacagtacgcaatggtctcatagcactcgattgcggcctttggatttgcacctattgtcgcaacaagtccatccaccacgatatcctcatgtgccattccaagcgaaagtgccttgtcataaatagtatttataatctgctttttctcctcgacatcctttggcaatcctgcatccgaaagtggtaagagtatgaacatcgccccgtattttgctgcaagaggcaataatttttccatcttctctgtctcaagagaaatggaattgatgagagctcttcccggataaatcttaagagcctcctctattacctccacatagcttgaatcaatacaaagagggcagtccactgttgatgaaacctcatatataaccgatttcatcatctccttctcatcgataccattcatgcccatattgatatcaagtattctcgcaccatttgtctcctgctccatagccatctggcgcaccaggtcaagctttccctcacgaagctgtgcctgcagctttttcttgcctgtagggttgattctctctccgaccacagtaaagttgccatctaagtcaatctctacattctttcgttcagacgcaagcactcttctatgatgctcaagcggcttatgaacaggcattgactttacggcctctgtgagagcacgtatatgctccggtgtggtgccacagcagcctccgacaatggatgcccccgcctccacaagccctctcatcgcatcggcaaacatatccggagtcatcttgtatacagttttaccatcctcaagctccggaagccctgcatttggcttggcaataagaggcactgtagagtactctgccattttctcaaccagcgctatcatctcagcaggtcccgtcgagcagttcacaccgatagcatccactccaagtgactgcagcacaacaactgctgtctcaggcggtgtaccaaaaagagtcctgccatcctcgttataggtgagtgtcaccataataggcaggtcgcttacctcttttatagcaagcactgccgctctgcactcctgaagactcatcattgtctcaaccacaaatacatctgcgcctgccgcatcaagaatcctcgcctgctccttgtacacctccaaaagctcctcaaacatcagatccccgagcggaaaaagctgtctgccggtcatcgtcatatctgctgctacaagcgccctatccccgacagcctgctttgacaggccaacaagcgtggtatttatctcgttaattttctcctgtaaaccatattctaaaagcttaatcctgtttcctgtaaatgtaggtgcataaacaatattcgtgccgttatcgacataagccttctgcaaatcaagaatcacctgcggatgctccatcacccattcctccggacacactcctaccggcatgcctgctgccatcaggtttgtaccggtcgctccatccaggataactatgttttctctgatatattttctgaattcttctcttgtcatttcgtttccttttctgtttcagctgttattcactccacagtgtaaaatatttcaaagcaaaagctatgtgctcttcatccttgaaatttgtgataatttatattatcattgtaaccgattttaaaacacaaaaatcaatagtctattcaccataatatactaaaacactatatttttcaaacaaaagaaaggatttcttatgaaacttatcgctttagatcttgacggaacacttttcaacaacaaaagtcagatatcccaggaaaatataaaagctataaaagaggcaactgctgccggaataaatgtggtcatctccaccggccgtccattcggagggctgccgtttgaggcaattaaggacaccggcatcctctacgctatcactgcaaacggaagtgcaatctacgagattgacaccaaaaaatgtctttacgaaaactgcctttctgatgagacagcgttttcaataatcgattacctgatgacaaagcgcgttcatatggatgccttcataaacggctgtggctattctccatacaagtgtctcgaggatgcaaaggatctcaaaatgcctccttctataaaggaatacatcatgacaaccagaaaacgtgtgaacgatatcactgaaatgatgcgcgaaaacaattaccatatgcagaaaatgaccatcaatttcccaaaggatgtagatgataactactactgccgcgacgaagtatttgagcatctgaaaaaaatccctgaaatcacgctcgtaagcggtggctacggtaatctggaattcacaaaagcaggcgttgacaaaggtgtggcacttcataagctggctcaaatcctgaatatagcagctgatgagacaatggctgtcggtgacaccgaaaacgacatggctatcgtaaaagccgcacacatcggcgtggccatgggaaatgcaaccgatgagcttaaggcacaggctgattacgtcaccgacacaaacgaaaatgacggcgtagccaaggctatccgccactttatgggttaatctcacaaatttaatataacgataccggtcatataagagtataatagttgtttagcgcaaaatagctgtttaacacacaataaataatcacctgtcatatatatccaaagaagcacatatacttctaagacaacatatgacaggtgattttttgattgtaaaaaaatatttatccaacccacttgtgaccggaactattttcctgacacttgccggtacaaccagtcggtttatgggttttttctttcgcatatttcttaataacgtcatgggctcaacaggtcttggactctatcagcttgtgattccactcatgtccgtatgcatgtcactctgctgcaacggctttcagactgccacatcaaaacttgttgccgaaaagcctcaaaacaggcagattatactcatttgcgcaataattatgtcagccaccattgctcttttactcacaattattatgtattccaatgccaactacataagcatttgtattttaagtgagtcacgctgcacagagcttgtcaaggcgctgtccttttccattctgcccgctgctatccattcctgcataaacggatactattatggattgaaaaaagcagccgttccagctgccactcaattaattgagcagaccgcacgcattggcacctgctatctgatatactcaatactatctgacggtggcagctgctttaagcctgtatactctatatacggtatcgtggcaggcgaagcgagcgcaaccgtcttttccgttatcacaataaaaaaagatttctcatactttaaaatatccgtcaaaagcctgaaaacaacagcctatggcatggctgcgcttttcatccctttatcactaaactacatattgacaagcttttcatcctccgtcgaaaatgtgcttatcccgagaactcttaagctctacggactatcaccggcattggcccttgacatattcggaaccatttccggactcacccttcctgtgcttttattccccggtgtgctttgcagctgtgcctgcgtgatgcttctgccatctgtttctgaagcaaatgccgccggaaaggatacaaaaatcacaaaaaccataaactcctgtgccttattcggactatgctttggtcttatctttacatgcatattctatctgctgtcggattttataggggattttcttttttcatcgaagctttgtggatatttccttagaagactgtgttttctgtgcccactgatgcacataagcggaatgctctgcagcatactgcacggtctgggtaaagcaaagcaggtgctctttgtcaatctgctcacctgtgcgataagaattcttatgattatgcttctcgtaccccactatgggatagatgcatatctgtgggctatgcttgtgtcgcatgtgtttatgacacttgctgtcgggattctcacctgccacacagcacacaaataaaaaaagcctgcacatactccaggcataccggaatatgtgcagactcataaaattacagattatacacgtgaaaggtactcacctgttcttgtatcaatcttgataacatcatctgtctcaacaaaaagtggtacataaactgtagcacctgtctcaactgtagcaggctttgtagcacctgttgctgtatcacccttgaagccaggctctgtctctgtaacagtaagctcaacgaaaagtggtggctcaactgcaaatacattgcccttgtgtgaacaaaccttacacatctcgttctcttttacaaacttgagagcatcgccaacctcatcctttggtaagtcaatctggtcatatgtctcaacatccatgaaatgatagaaatcatcatctgcataaagatactgcatatccttacggtcaatgtgtgctgtagggcatttctctgttggacggaatgtcttctcaacaacaccaccactgatgatattctttaactttgtacgtacaaatgctgcaccttttcctggtttaacatgctgaaattcgataatctgatagatgtttccctcgaactcgatagtaacaccgtttctgaaatctcctgctgaaatcattagttacttcctccttaaatcgtgcgagcctaagctctctcattcgtccattttacaataaaaagcaatacatttcaagtatttattttctattgcatgaatttgtattggttttatattagtttctagcctcgatatccgatatcatagctattctctttgcgtgtctgccgccctcaaactcggctgtcagataagcctttacgatatcctttgcaagctcaacacctacaatcctctcaccaaaggctatgatattggcattgttgtgctgttttacaaggcgtgctgtggctgtgtctgagcaaactgccgcacggattccgttgaccttattggctgctattgagatacccacaccggtaccgcatatcagtattccgcagtcaaactcgcctgacgccactgcattagccaccttctcaccatactccgggtaattgcagctctcacttgaatctgtgccgaagttggtcacctcgtgacccatgctctcaacgtactccattattgttttttttagctcaactgctgcgtgatcgtttccgattgcaatcttcataatatatctgcctccaaaaaatttaaatttatagttaaaaattatttatttactttctttaaatgcttcttgtagcatgcaattacaggcttttcaataaagcgcttaagcacaatctgtatctcctcatgtgggtcaataggtgctacaagtattgatctgatgcccgtaagattagctccgatgatatccgtaaatatctgatctcccacaaaaagagtgtttttcgtatctgtgccaagcctctccattgctgtacgatagcctgatggcttgggctttcctgccttgtagatatactttatcccaacctgcttagcaaagctcttcacacgcggctccttgttgtttgagagcacaaggcacgaaaaaccaagctccttaaggtgcttaaacaaagcaatcgcccgctcatcagcaggcgaaccatgagtcacaagggtgttgtcgatatcaaaaataatgcccctgtagccctccttatataatttatcaaaatctatgctgtatgtcgagtcaatgtactctcccgggtataaaaaactcatagtataaaattctctgtctccctgttaatctgttcattcaaggctgcctgctgcataacggtgacatccgcactgccaacaaaacgctgatactgctgcaataccttatccttgtctaaatcggatacagcctttgcgacatcaagtgtgctgatatcactgtcagcacccttaagctcatagctcgcattggaatcatatgtatttgcataatcaagcgaggtaaagctctgccttgcccttgcagcctcatgatcagccgtatcatcagcaatggattgctgtgaagctgtgtcatccactgcctgcttcgaactcataatctggctgtttctaagctcgtttacccttatggaattgtatgaataaaagccttcgctcgggcgaataccggaaatgttcatacgcaccttcccatcatgttttaaataaatcctgctgcctaaacactatttggtgtcaagcatctttttaagctctgtcataaatgtattgacatccttaaactctctgtaaaccgacgcaaacctcacatatgctaccgcatcaaggtcctttaatctgtccataatcagctctccgatgagtgatgtagggatttccttttcctctctggcaaagatttctatctcgacctcatctacaagctttgagattgtatctgctgaaatcggtctcttgtgacatgcaagaagcacgcccttttcaatcttggagcggtcatactgctctctgttgttatccttttttataacgatgagcgggattgtctccaccttctcatatgtagtgaaacgcttaccgcaatcatcgcacagccttctgcgcctgatagagctgttgtcatcagccggtcttgagtctattacccttgtgttgtcactactgcaaaatggacacttcatgctgtaccctccgtaggtatcatatagtatgaagaagcaaaatatctttgtttctcattataatacttcaaatcatcatctgtatttaaaaagacctatacatattttagtatatatatactaattttcgttgtcaatatgttttgtactgattttgacttttttataatttttttgtatttataaaatcataacagcttgcgccgcatatcagactcacatatatttaccaatattatatcgggtccaatcttcacaatcttaacccatggaatacaatattcataatccctgcaaaatattcccatatattttcccggtcccggcacgataatcgcacagattttgccacagaccggatcaaactccaaatcccgtacgtgtccgatgaacctgccctcctccacgctcacaacctctttttcgcataaatccagaaaacgcataaaacagacctcccttggtctatcttatgcgtttctttttgattttgtgcttataaaagcgttttattcataaaattatacattaaatctgaaaagaattacatctccgtccttaacaacgtactcttttccttccatgcctacaattcccttttctcttgcggctgcaaggcttccgttgtcgagaagatcctgatagttgactacctccgccttgatgaagccacgctcgaaatcagtatgtatcttgccggctgcctgtggtgcctttgtacctttctttatagtccatgcacggcactcatcctctcctgctgtgaggaaggaaataagtcctagaagtgaatagctggctgctacaagcttatcgagaccgcttgactcaacacctaaatcctcaaggtactccttcttttcgtcctcatcgagatctgcaagctcctgctcaatctgtgcacagataacaaatacctctgcgccctcttcctttgccatttctcttacctttgcaacatgcggattgcttgcgccgtcatctgcgaggtcatcctctgatacgtttgctgcgtagatggtaggctttgctgtaaggagattatatcccttgaaccaaagctgtgcatcctcatcatcaggcacttcaaaggttctggccatctttccgtcctcaagatgagcctttactgcctcaacaagctcaagctcctttgcaagtgtcttgtccattcttgcctgctttgcaatttttgcaattcgcctgtcgagaatctcaacatccgagaaaataagctcaagattgattgtctcgatatctcttgcaggatctacagagccatctacatggataatgtttgtatcctcaaagcagcgcactacgtgtacgattgcatctacctcacggatatttgcaaggaactggtttccaagtccctcacccttactggctcccttcacaagacctgcgatatcaacaaattcgattgttgcaggtgtaaccttctttgtgtgatagagctctccgagctttacgattctctcgtcaggcactgaaacaatacctacgtttgggtcgattgtagcaaaaggatagtttgctgaaagcgctcctgcctttgtgagtgagttgaataatgtagactttccgacgttcggaagtccgacgattcctaatttcattttatcttttacctgtccgaaaacccttgatttatcggggttttcgcctttctctatatttttattacaccctttttacacccttttttcaactgtgggtgtagctgcttcaaattgctgaacagcttttgcaagggactcgtccgtaacatggacatacctgtccattgttgttttaatacttgcgtgtcctaatagttgctgtaaaactttaggttgtacgccgcgttcaatagcgcgtgtagcataagtgtgtcgtaaggcgtgcatacaaaaacgcttaataccagcttcatcacacaatttatataaatgtgtatcgtaggaact

SEQ ID NO: 1666 - DNA, 229 bp, Unknown
  gut microbiota DNA sequence
cctcatccacatcaccaaacatatctgacagcttccttggaccatcccattcctttattccgagatatactgttatcgttatcaccggtatcagcttatcctctttcgtaaatcccgagagaaattcatcagaagttgcgatatccttttccctgcggtgctttttggctgtttcctttacctgattgccatatgccatgacatcataaaacatgttttttaccggaat

SEQ ID NO: 1667 - DNA, 213 bp, Unknown
  gut microbiota DNA sequence
gccgtatcggaaggtgcggctggatcacctcctttctaaggaaatcgagtagagagtttttcactgttgagttatcaatagataacagcatatttttggtggcgatgcgtttttgggaaacacccgttctcatcccgaacacgatggttaagacttaaacggccgatgatactatactggtaacggtatgggaaagtaggtggctgccaaatt

SEQ ID NO: 1668 - DNA, 393 bp, Unknown
  gut microbiota DNA sequence
ctcggatgtcttgattgttagatattcttaagaatagaatatttattcatcaaatcatttgtatgaagttttcaaggtacaatgtcgactgtaacagttttattacatcgacgatggagacggagagattcgaactcttgaccccctgcttgcaaggcaggtgctctcccaactgagctacgcccccatttgggtaacttatttaattatccaaagccattcggctagtgggcttgagaagactcgaacttccgacctcacgcttatcaggcgtgcgctctaaccagctgagctacaagcccataaatttggcagccacctactttcccataccgttaccagtatagtatcatcggccgtttaagtcttaaccatcgtgttcgggatgagaac

SEQ ID NO: 1669 - DNA, 412 bp, Unknown
  gut microbiota DNA sequence
tctggaacttccggcaaccatagaaacagcctgccggacagcaggaagaaaagtaccggagcttgaaggtttccatttccacacactgcggcatacctacacgacaaacctcttatccaacggggctcagcctaaggatgtgcaggaactgttaggacactcagacgtgagtaccaccatgaatgtctatgcccatgctacaagggaagcaaagcggacttccgcaagacttcttgataaagtggcaggcaacgattaaacaactgaataatgaattttcccttgtaattatcccataagggcaaaaacaagggaaaaggatacatatatagaattttcaatggcgggaagccttgaaaataggggaaagttaagagagttaatagataaatttcagtttgcaaaactgacc

SEQ ID NO: 1670 - DNA, 423 bp, Unknown
  gut microbiota DNA sequence
acgaagaggaagttaaaaaaactataaatggattgatagaaaagggtgtgcttgcatctgaaacagaattgacgaaaatgggattttttccggcaagagcgttggaatgttataaagaaagtcggaatcatattattataaattatttacatattgcacttttggaacaaagagaggcaattgtgatcattcccttgaaaaatagagaatatgagatattacggctgcctagagttgctgttttatatttattattgaaaagatatccggtattacagattggaacagtaccggaaaaggaacagttacagctgcaagacattgattcttttttaagagaagtaaaagactgcaaagagaatatcatgataggagaatttcaggataatgcattaacaaaagaatggctttattattggaaga

SEQ ID NO: 1671 - DNA, 189 bp, Unknown
  gut microbiota DNA sequence
gaattgagactgactggatagttggtctcttttctgttatgctttgatttctggcggctggaaaggagtcaccatgtcaaagtttttaacttatgaagatcgaatgattattgctcaacgccttcaggagaatgcatcctttggggcaattggcaaagagttaggaaaggaccgtacaaccattgccaa

SEQ ID NO: 1672 - DNA, 1102 bp, Unknown
  gut microbiota DNA sequence
taagagcatgcttatgaactcttcacctgctcataaacaagtgctctctgaatatctcccgaaacagcttatcggcactccaaaatacattatcctgtgtaacgacagccttacatccgattggttcaatccccgccttcttatattccgccagaaagatatccatttgtgatgaattaatacctgaaaaaaccagaagctccgccgggaaatcggctccgctataccttgaaccatcctttttgaatccggttattccggctatggcaccgagcttctgtccgtaatctgatttttccacctgttgcaccgatattccaagggttttgcacaggacttttattttttccactttttgtgctgctacactaaatagcagtattttttgtgtcgatttctgctgcattcttaacatctcctacttcaaggttatatgttactaaattatctcatattgcatcagctcgtatttcagtctgcttccctccataatctctggtgggagcagtgcccttgccacaagcttcagatcatctgattcaatatcgcatctctttagatttgcatagtctccgtctatggacactacatcgtaataccaggtttccatgtgttttcctcctaaatttcattttctaaagcatctactgataattccaattcactttgttctttgctttactgtaagtggagcaggtgtaattgtcctgtgcattggtgtactttcctgtaggattaccgtttttgtccttcttttcataaccgccggtgctttgtgtcaccgctttgctcatcatcacgggataatctctcgtagagtgcagtgattttgtttagttccggttgtttggttttcataagattctccttttaaaacaaacaaccagcttatctgtggttttattctaccacgaataagctggtttgtgtaaaaataattattgtctcactaataggagaaatctgacagaaaatcggaactgttttataagtatcacaaaattttaattccataaatttatgggaattatgagagagatatggatgcctttgttacaaaaatatcaaatttcctgtctgttgtcgttttggcaaattggaa

SEQ ID NO: 1673 - DNA, 177 bp, Unknown
  gut microbiota DNA sequence
ccaattcatcaatgagcacaacacctgagccttccaaaggattcacatctttacccggatttgccaatgccattcttcttgccaaatccccaaatagagctatcgtgcatttttctccatccgataactgatctatctttaaagacttgccgtttttattgaccttcattgccaaag

SEQ ID NO: 1674 - DNA, 492 bp, Unknown
  gut microbiota DNA sequence
atcttccacctagaaagatgatgggaattgaatcttgtggtatgttactttcagcagtaaacaatcttaaggattcagaggatgaagaacttcatctgctgatggttgataaccatattcctgctggtgcaaagctgtattaagatgatgtaaagatgtaccgttttactaaatagacgggacgtacttcatttgataaaaaactaaaaaaacagcgatttacatcaaacttacatcaattgatgcagaattaagtgcaagcaagaaaaaatcgcataattagtgcagtgagtgggcaattccaatcgggattgcccattttctaaaatgaatagaaatgcaaatcggagtttgtttatgaggtgacttatggatataaagattgaaaacggcaaaatcatttttagcgagaataatattaaatattcttttgatgctcacggagagtatcctcgtccgtcaataatgcctgcaatcagcgttggtggaaag

SEQ ID NO: 1675 - DNA, 6404 bp, Unknown
  gut microbiota DNA sequence
acaccatattttgcaagtcacccccaacggattgaaattaatggattcgttcagaccacagtgtgagtttttcataatgatacagtttccttcctttattatgaaaagagtgtatcagaaaaatatgggtgctaacagttacggatgattacctacttacgttttatatcgagtagcgtaaaattactatagataattaatcccattttgtatataaaaaatccaatcagtactttagtattatcagtcgtcactattatacattttaactatttcgcctatatttttatttaaatcaatagcattgcaaattaccatttgtttcacgtttactccgtatttttccgaaaaatttattaaattctttttagcatataatgcttcagaatcataacatcctttatctacataatatgccacttgaaatactccgttatctacaactacaattcctgtatactcatgatcatctttaaaaagtgattcttcacctcgatttcttttgagtattataacttgcagttcattttcacctaaatttgctttaatcaaatttattaatgcttcttcatatgttgaaggattattatctgcaactttcaatggtataatattatttcttaaatatggaatatgagtatatagcctatcagccttgttcatactataatacatatcacttaattgaatatattctaattcttcctttgaccactcttctctacgttgtgacaggaccgcattaacaaaaacatcataatttaaatacataaaattaaaatcaataactacattattattgctatctacttttactgcatttgggcaaattttattaattgtttctataacactttttattaaaacatcactttttggccacactttatcaataacttttttattttttttcaaatatttttttaattcttcaatttgtaattttcttaatttagtaacctcctctattattgcttttatatttttaacaatcaaatccaaataacatttttctaaatatgataattcaaattgttttataacatttattagaatataagcttttataattgtaactttatcaacgtacttgtatttttcgtggtcaatatttaataatctataattcccgagagtattataatattccattagacataacaaatattttttttctccaaacatcataacgcagtatcgtatagtttcttcaaacgtcaataatggcatatagtattttccagtcaaatatgtatatattttatttttgttaatattattatcactatatttaatatacattaaatcatcaactatgaaaaaactgaaaatatttttttctacaaaaagcttcttatatcgcttaaataattttcccaatacattcgccttcattttatctaattcgtcaaaaacaaatattatatttcttttttctagcctactaactatcttaaaaatatcttctagcctatcattttcagttttactcattgtcgtcgacatatttattaacttattatctttattttcaatttcgtttttatcttccatttttcctttagtattaatatctgccgtaaaaatttttttaaatttcatccccaatctagagtttaaagtggttttttctttataaacttcttttatctcactatttactgcttcctttttttcaatttgttgttttatctcatattctaattttaattttatttcatctaaaattgtctttaattctttgtcactatcctctttctctctttctacactttcaattaaatattctaaaactaatgttgtaaatctatctaaaacatcatattcattataaaaattcacatgaataactaatgatttggtaagcgtatacccagccgcaatatctaataagctacttttacctgttcctacaactcccccaactaaatacgagccatacattttcttattaatatgttcaattatcttattaatattatcggatttaaaaatatacccaacttcatcttttccaagtggataattaagatttgtttttctagattcatataattttgacatatattcaccgctttccttttattgcatttcgtgaagataatctaaattcatctactcttaatagtcactacgaacccatccaataccaggctttctctccatttgattatgtaatgatgtaacaaccattcccgctaattcatctggatttttccatttctcaatcattcgatctttttgtactttttctttaaatttttcaagttttttcttcttttcatcagattcgataaaattcttttctactggaacattatcgtcaataataaatgcaagtattggcttattcattttcatagcatataaaaattctttttctgtataacttatcccagcatcgcttccgttctcaatttcagttccatatcgatttccaataataaggacataataatccgaactttctatagtgccttgtattatttcccattgtccctcatctcctgcattaaacatttccatgcccacaggaaaatgcatcatccgtaaaatggcatccctaactttttgtcttggttctacaagatcagtataagtcgacgagataaaaatttgatattttttctttacatttttattatcaatcgaatatttaactttttctatatcgctatcttttttatttaaagaaatataactcattttttcaaatagattcattttatcttcttcaagcatttctgccgctttgtctcttccttcttcagccatttctgttcttaatagtgatttttgtactcctacatattctttaaatattgaccacttatttatattaaatgctaaatcatttaacctttttaaaataacaccgtattcatttggcaaatattgtttcaatttcaaataataatcataattgcaccctatcgaacaaaagtcatcatttaattgttctatttcagatgacaaaaaactatccacctcatggcattctgatgatgcaaaatccagttgcttacaataaattttcaacgaactatcccaaacacattctccattttcatcaaaatattttattatatactctgttttatagccaaaatcattccagcctttattataagataatacaatcgtgtttttgtaatcacaacataaagcatcggcctttacaattttcattatgaatcacctcgtatgtttttattataatttttctcatatttaaatataaaatagtaaatttactatagccacgtaatctcaataaatcacaaccttcgttccatttggaatattatcatacagccactttgcattattaatgtccaatcttacacagccatgagaaacttgtttgccaagcgttccatcttgtatctgtgtcatactaccacgattataaagcactgaatggaacaaataatttccataaaactgcgtataataccaacatgtataaaacctgctaccaaaagatttacctcttccatagattataaactccccttttactgtaggcgtagaaggctttcccggcccacatgaccacaatgcaactcgactccaattaccatagcttccactataaacgcctacctgacatgcagatgtgtctgtcataataagccatcttgtagaactggctcttacctgtgcgttctgagacattacatctaatgctgccggttttggtgtatatacaggcttatttttataataatttgcaacacttccaggtgcagttgccccctttcttaccaaattaatccttagagcctctactctataactaataccagttgagcctgatgtctgcccatttgaagcccaacctaaccatccataattctctatatgtgaactgtagtatatattataaaatgttgctaactgacctgtaagctttatctcaatggcttctacctgcttagccctacctgaggttccagaatattgccccaaagttttccatccagtccatcctatatcctgcacatgcgttctatacatgatagtaccggttaaagaatgtacagtatcctgagataaattgatattaattccttcaattctcagttttcgtcctgtcgtacctgtaatgttcccccctgaaacccacggcatattacctatatcctgtacatgagatgaatatgtaagatagctgttagcaagtccctgtaaataacttttctctgatgtaatttcaggtttattgctaagctcatttttgtctataatccggatttctaatgcttcaactctatctgccagtccgatactgcctgatatctgaccattttttgtccatggcatccagccgacatccgctatatgcgttctataatagatatcaaaatgttcactcaattctcctgtaagatgcatctttattgcttcaatctgcaaattacgtcctactgttccggagatatttccaccacttacctcattctgccagcctatatttttaatatgactggcataggatattccccctgaatatgatgttgaattatcaagtactatatttatggcctctatttgcagtccacgtcctgttgttccagaagtagttccatcacttacttcattctgccaaccgatattctgtacatgtgctgcatatctaacaccaatataatattcatcaggttctatctctgtatcagtatcagtatttgtccctgtcaaatatcccgttttctcaatattcttgtctacttcagaactttcgtcattttcttcactagaaagctgatctgaactagataccttgttttctattgcagtattttcaactacagtattttctgttacattactgtcaacttcaggatttcctatctcattttccacaattccgtcagataattcatctgcataaaccgtactggtagccaaaataagcactgatacgagcataatagaaattaatttcttcatgtatagcacctcctcaaatttatagtcctattttatcacatatgcattttatttaaaacaaaaaaaagaaactaatacaaattatctgtatcagtttcttttttattaatttatctggcaatatatgccattgtatttttagaaattattccaccataattattgccaggagctgactgtcctttcatcactagcactatctgcaatgcttctaaatgaaggttttgtccggatgttcctgcattctgtccattctttgcccattcgagccatccgtaattttgtgcatgtactctgtaatagatatcgtattgatttgccatttctcccgtcagagacatatttattgcctctacattcaaagctctgcctgtcgttcctgcaagtgcaccatccatcaccgtattctgccagccgatattctgtacatgtgtctggtattttattcctcctgaacacggctgcccgtcaagatctatccttattgcttcaagtccgagatttctgcccgttgttccactgagacttccgttttccactgcaccctgccagccgacatttctcacgtggctctggtattttactgacgcatttgtattgattgccggaacagcactgctttttgatatatatgcgtttgtgttattagatatataaccgccatatgccgttgtcggtgctgcatctccttttgccgttacaactatctggattgcctcaagtctatatgcatatcctgaggttcctgctgcctctccattttttgcccaggctaaccagccatagttctgtgcatgtactctgtagtatatatcatacttatcagcatctttaccggtaagttttagcatcaatgcttccacatgcttattctggccggttgttccactctgttctccattgaacgagtttccatgccatccgtcatttttcacatgtgttgtatagatcacaccaatgtctgcatctgattttacatttatttttattgcctcaagctgcagtcctctgcctacggttcctgccatagctccatctgacacgccattctgccagccgatatttgctacatgtgtctgataggatacagatacactgtttagtacccaatgtgcatacaatacatggtcagaagctgtttttactgcacttccagcatttacctgttcgccactgtctacagccgtccaccagcctgcaaatgtatatccgcttcttgtcggtgtaggtaattcaccatatgcatttccaaaaataacagtttttgaattggtattaactgttccaccatcagcatcaaatgtaactgtgtaactgtttgatgcccaatgtgcataaacagtctgatcagctgtaacctctacctttgtatctttagtgatctgtgttccaccggtagctgctgtataccagccaataaatgtatacccatctctcttaggtaattc

SEQ ID NO: 1676 - DNA, 177 bp, Unknown
  gut microbiota DNA sequence
gggctgataaaaataagactacaccaaagacttcagctccatctatagaaacagcaatgaatgtaatgcgaccatatattgatgaaggtagggagatcatatgcttttccatatcaagtgagatgtcgacatcaatcaatgtgatcagaatggcggcagaagaacttgatgcagaag

SEQ ID NO: 1677 - DNA, 546 bp, Unknown
  gut microbiota DNA sequence
caattgtataatttttaccagcaatacttaccttatcgcccgcattgagtgtctttaatgtaacatcaaccttatcacccttatctgtaagcgtaacaccgtcaagtccagcatcatgtgcatttacattatgtgccttctctgatccatcaccctttaagaggtatgtctcattgaattttgttgtctctgatacacggtcaatctctgttgtgagctggtcaatctcgtcctgtattgccttacgatctgtgttagagtttgttccgtttgcagactgtgtagcaagctcgttcatacgctgaagcattgagtgaacctctgtgagagcaccttctgctgtctgtactgctgaaacaccatcttctgcgtttgttgaagctctgtcaagtcccttgatctgctttctcatcttctcagaaattgtaagtccggctgcgtcatcagctgcacggttaattctgtaacctgatgaaagcttctctgtgctctttgactgtgcgcttgttgttacgttgagcattctgttggcatttgctgcctgca

SEQ ID NO: 1678 - DNA, 177 bp, Unknown
  gut microbiota DNA sequence
cttccgcatcaagttcttctgccgccattctgatcacattgattgatgtcgacatctcacttgatatggaaaagcatatgatctccctgccttcatcaatatatggtcgcattacattcattgctgtttctatagatggagctgaagtctttggtgtagtcttatttttatcagccc

SEQ ID NO: 1679 - DNA, 177 bp, Unknown
  gut microbiota DNA sequence
ttggcaatggttgtacggtcctttcctaactctttgccaattgccccaaaggatgcattctcctgaaggcgttgagcaataatcattcaatcttcataagataaaaactttgacatggtgactcctttccagccgccagaaatcaaagcataacagaaaagagaccaactatccagt

SEQ ID NO: 1680 - DNA, 402 bp, Unknown
  gut microbiota DNA sequence
cagagcgagaaataaaagtgaagaatagaaaaggaagggaatggatatgaacgaagaatatgggctaactccttatgaaacaagggaaatcctgttttataaaactgataatggtgaagttcgggttgaaatccttttatatcaggaaaacttgtggctgacgcaggcaaagatggcagaattatttgaagtgcaaaaggcggctatttcaaaacatttgaaaaatatttttacatccggcgaattgcaggaagaagcagttgtttccaaaatggaaacaactgcggcagacggcaagcggtacaatacaagctattacaatctggatgccattattgctgtcggataccgtgttaattctaaaaagactacgatgttccgcatttgggcaaatcgagtatt

SEQ ID NO: 1681 - DNA, 51460 bp, Unknown
  gut microbiota DNA sequence
aattacggaccgcatgccacctcctgccgtggcagcgcacatactccccgtaagctacgctgcgcggctaagattctgtacgaaattatgcttacagtctttctatgcttgacgaaaccggcttttatgcgccgtccatggcgcataacgccttgcccagccgtccatggctgggcatttctgtgtttcacggcataatttctacagtatctaagccgcttcgctattcgcttacggggagtatgtgcgctaccacggcagacggcgacctgcggtacttactctttgctaaaactcaggtactttattgtggcttcggtatctgacagtcaacatacaggatatggtttatcagccagtctgtgagatacttgaggattcccatgatctgctcatcctgatctatctcctcatcactatgatgctcaatgaactcatccagcttttgtacaaattccatatgctgaaccttctgtgtaaacatcttcttgtaatggattgattccatgtactgctcctcgtcagcaaagtgctttaccgtgtagtcgcgcagcttctccaagatgatatccatcttatcatatttatccggtgtaaactcatcatgcagcagttcatatgcctcatctgcatatttaaataactgcttgtgctcttcatcaatcatatctattccgatataatattctggtttcatttcatacataatttcatccttctttcttatgtagtaatatataaactttatgttttatcattagcaatactttgacattccaccccaaatgacttatgatgtataacgtaaacaggttgctgggcgactatttcaagcgccagaaccataaaatatggtactgccggtcacatcgcagtgtggccggtgataaccggacagtcattaatttatggattttatatgcttccggttgtagatcagatgcagatacatcgcatcgtgggcacggacggcatcgtgggctgcaattgcatctgcaatttcacgatgagtttcgatggtttcatcccgcaaggtgaattctttagaatcactgatcagaggaattgaactgttgatgataggaaccagctttggaacaactatatttttgctgcttaaggcaatagcagtatgaaatgctctatccttttcagcgtgatttttatttgcaagaaggagcttttcggtattttcacatgcagtaagtatgttttggatatctgtctcatctgcacggatagcggccatggcagctatggatggttcgattagaaatctgatttccatcagatctttaatcatcttttgtttatcttcaacaaaggtcaggccgaatggatcatcaatcatcccgggagtagcggaaacatatgaaccggagccttggcgtatggtgatcacattacgtgatgcgagtgctcgcatagcttcacgcagagagcttcttccaacattcagccgttcacacattacggtttcgttcggaagcttgtcacccggctgcagattttcctccagtatgtatttaataattctctctgcaatcctttgggaaagagttttttctttggaattttgcatgtgatttgcctcctgttgcccaataccttgatgtttagtttttctgttcgtttaaatattctttcaaatatttcattggcattctttttttctgtaactcccggaaaatattccttatatcccatagttgtttaaaaacacgcctttttcgcatggtctgccatacagatatccctgcatataatctacatggatttctttcattgcgcaagcccactcttccttctcaattccctcaatgcagatttttatatttacactgtgaaccatctctataatctttctgaacagctcatggtccttttcactgcgcatcgccattgccgtaaaatccttatctatctttacatagtccgggttcatctcactgatatagcgaagatttgaatagcctgttccaaaatcatctattatgaactggatattattctcatcaagctttttcctgaagctgcaaaaacatggcgtcatatccatgaatccactctctgtcatttcgatacagatggattcaggtctcagattgtttgcccggatagcagtaaggattttatttgccatacttccacgcataatctgtatatatgatacattgatatttaccctgaaatccgcaatatactgctgcatttcacggcacatttttgctgcttcgttcaatacaaactctccaaccggaatgatgagcctgctcttctccagtaaaggaataaactcaaccggggaaatcatttcatcgccctcatccgaatgcatgaaaaaccgtaaaagtgcctctgcaccgattattcgatcagcactatctaagataggctgataatatacctcaaagccttcaaaatcatttacagttgcgctacgaagcgcactcaggatggtatttttgcgcaatgacactttataatcctctgcctcaaagaaataaatgcttcctctgcctcttttttttgcgcattttaaagaaaaatccgactttttcctgcactctattgctccctctgccagtgttgatatatctgtcactccggcagaaaccgaaaagattgatttatagttttcatcaactataaactcatcaattttttcacctatccttttgaacaactgcaccacatcatcctgcgatttgctaagcatatccacaagcatatacttatctgtaacaagatgatatattctctgaccgcttgagagacattctgctatgcattcggccactcttttaagtatgtagttgccatatatctgaccctgaacattattgattatcccaaaatcgtcaattccaatctgtatgaaataacctgacagcttctctttaggctgtgaatagagatatgatgccatctccttttcacctaacagcccactgatattgtcagctcgctgccttgttcctgtctcgttcatgcagcctataatatatcgtggtttccccgcctcgtcattgatgacctccccacggcagttaatccataccgggatatttttgctgttcatcaaacgacatagcacgttgtaccttttttcttttccatcatatattttacgcttgtgattttcgagcagcttacggtctttctcataaaccaatgtacgaagatgctttgttgcatcattcataaatttatcaggaagcataaaacgctctaccgctgactgtgatatcctcagtgtatcattctttaaatctataatatacagataatcatccatacaaggtgcaattaagtctatcagacttcctgcctcctgctcgtcaagtattttatatgcatcaaaagccctcattaaatttcaccttctattatattactcttcaatgtctgagattttgaattttgctatcatttcactcagattttctgattcactgctcatctgctggctcgcagccgcacactcctgtgatgttgctgaattggtctgtacaacatcattgatctgctcaattccttcgttaatctgcttgatctcactggtctgggtctccagtgtatcagctatattagtcacctcttttgtaatcaccttagagttctctgctacttcttcaagctgtgaagctgtctgctctgcaatattcatgcctttttcaacagcctgcacagatgtctctatgagcgcagctgattcctttgcagcctgtgcactttgatcggcaagcatatttacctgatttgccacaaccgcaaagccttttcctgcctcccctgctcttgctgcctcaatagaagcgtttaatgcaagcaggttggtctgtgatgcaatctcattaatggttgatataatctgatctatctgtttagaggcttcgtttatttcatgcatagatgtaaccatctcctgcatctttccattgctttcccaaattgcacctccaagctcatccactcttccactgatttcctttgcactctttgaattctgctccacctgctctgaaactccctcaaccgtcgctgtcagttcctctacaaccgcagcctgattggttgcaccgtctgcaaggtcatttgagcttgcagctacctgctctgccgcacttgaaacctcgcttgatacattctggattccctttatggtgactgccatacttttttcaaattccataaatgaatgtaaaatacctacaaaatcgcctctccactctacttccggctgtgcatcaaaatgtccgtccgcaaagagcttcatcgacctgtctatatcatccacatatgagccgagaatacggatagactttctcatgctgtgtgccaatctaccgatttcatcctctgaacggtaatcaagtgtgctgtgaagatttccttctgtcagctcctttgccacttcctcgattgcatgtaatggctcaaggattgtatcaagcacgatctttcctgttctctttgtcaactgccatgcacatatcagacagataatgatgactatgagtccgactgcagcacatacatatgtccttacaactgcctgatggcttctttcgtcagtcagcttgttgatttcctttgcaagctcaactgttttatttaactttggtgtacactcattgataatctgatcaacagcctcatccttctgtccggctttaatcttatccatgattgagtatccgatattcgcccagtcagaaagagcctttgaatattcattatactgattctcaggaacgatacctgatttttttattgtttttaactgcacatcaacatcttcaagcttttcttttgcgccctgctcatagtcgtcatatgttgatttgtcaggattaagtgccatctctcttacatttctagccgctgcatttacatttattctacatgtcttaaccgcctgatcggcagcatttaccttgtttacatagtttaacatattgaaaaacaacacaccaatgaccgcaatcgaaagcagtcccgaaataagcatcatggtaataaccattctatagccatagttaatcctttcacccaaatgcatgttttccaatttctttttcatcgcatctttttttgaagacatagtttgttatttcctcctatcttatgataccttttgaccctttaatcatattattatttatactcaagtctgaattcgtcagatgaatttagtatagtactatttttctaagggcacaatactatattctcaataatctttatgtgaatctttctatcaaatatgtggatttgcacaaaatggtcgatttttttcgcaatccccttaaaatacatatgatgattttttcttgttttatgtaatgatgtaagccccggctgcccgaccggcacacacagcttccccacgtgctacgctgcgctgctaagatactgtacgaaattatgcttgaagagcttctatgcctgacgaaaccgtcgaaacgcgccgtccgtggcgcggttctcctcgcccctgcgtccatgcaggagcgtttctgtgtttcatggcataatttctacagtatctaagcagcttcgctattcgcacgcggggaagctgtgtgtgccggtcgggcagccggggcttacagttatatattcaagaaaaatcagctcagaagtgaaaatgcaaataccacgatgccaagtattacaagcacaatacctgtggcacggtttaaggtttttgcggacgccttgtttgcaaagaccgctgcaattctcgcccaaaggagtgtaaatgcaatacataaaagcagcacaaaccagtccggttttccaccgatggcaaagtgcgaggcagctcctgtaaaggctgtaaatgccatgataaatacgctcgttccgactgcagtcttaagctcatagccaagcactgatgtgaggatgaggagcatcatcataccgcctcccgcacctatgaagccacagataaatccgataagcacaccgcagatgattgactggattgctctctttttagctgaaactccctgcatggcctcctttgttgtcatgacaggacggactataaacttgattccgagtaaaaatgtcataaatactgaaaagctgcccattgttgctgacggcacgaggcttgatacatagcttccaacaaccgtgaagcataaaaccgtgaccatcattatgagcccgttttttacatcaaggttcttgttctttccatatgtataggctgacactgcgctggcaagtacatcagacgacagggctattcccactgccatataagggtccattcccaaaaatgtaatgagcatagggcttattactgctgctgcgcttagtcccgcaaagccggttccaagacctgcgcccataccggcaaaaaatgttactattatagttattaatgtgctcatttgtgtgatttcctcctgattatttcatccatattattctcaagctgttccataaccatcgtcaactgctttttctgctcctcatctatccctgcaaacagatttgctgtaaactgctgctgtatacgccttcctctttcaatgacagtcccggccttttttgtacagacaagctccgtcttcctcctatcattttccacaggttttctctccagatagccctcattcacaagcttgtcaacatttacagacacaagatttgccttgatttttcttatttcaactatatcccttgccgtcttatattccggattgttcgccagaaacatgagtatatcaaaggctgtctgcggaagctttagctcatgacacagtggtctgcactcatcgctgtaggttcgcgaaattttctctgcaaactcaaagttaaatttcatatgtgatattccttctttccttttcctattttgctgctttgttatacatttttgaattattcatttttgaactaattatatatctctctgtcattttgtcaagcggttatcgtaatttataccctgcaatgctatactttcaaggtattatataactattatgatatgatttaacagttatataataccttgaaagtatcctgcagtcatggtattatatgtaattggcgctttgttgcacattttaaacaccggctaatctaccggtgattttaattttaataactaaagcttcgtacatgtataatgtaggatttttaaattaacaatcatttacaataggaggaattatgagtcaggaaacaaattcagcccctgtaacagagaacaagatgggaaccatgcctataggcagacttgtatttaacatgtctttgcctatgatgatttccatgctcgtacaggctctatacaacatcgtggacagtattttcgttgcaaagctgtccgaaaatgcactcacggcagtttcacttgcctttcctttgcagacactcatcatcgctgtcgcaaccggtaccagtgtaggtgtaaacgcgctgctgtcaaagtccctcggcgcccataaatacgacgaggccaacaaaatcggcatcaacggtgccgtactatatgcattcagctatgtaatatttctgattctcggacttacaatcgtaaagcctttttacatgagtcagattggaaatgctgatgtcgaaatcatggatatgggtgtgagctacctgagtactgttatgattttttcatttggtatttttgcggaaatctattttgagagggtacttacctcgacaggaagaactattttcagcatgacctcacagctttgcggtgccatcacaaatatcattctggatcctatcatgatctttggactgcttggcttccctaagctcggtgctaccggtgctgctgtggcaaccgttgtgggacagtgcgtggccgctgttgttgcttttgtctgcaaccacaaattcaatcatgatatcaagctgagcttcaagggctacagcccggatttcaaaatcatgggaaccatttatgctattggtattccatcaatcatcatgcagtctataggctctttaatgacatatgccatgaacagaatacttatcggcttttcatcgactgccgctgctgttttcggtgtttatttcaagctgcagagtttcttctttatgcctgtattcggactgaacaacggaatcacacctatcatcgccttcaactacggtgcacagaacagaaagcgtatggttaagacaataaatgtcagcctgataacagcattctgtctgctcttcgttggctttgcctgctttgagttcataccaaaggtgcttcttggaatgttcagcgcctctgacgatatgctcaaaatcggagttccggcacttagaataatcggtgtgcatttcctcatcgcatggttttgtattatcgtcggcacagtattccaggctttgggaaaagctgtcttttctatgattgtgtcaatcatgcgtcagcttgtggttttaattccggcagcatacatcctttcaaagctcgatggactccacgctgtatggtgggctttcccgatagcagaggtcatatcctttactgtttcgacattattcttaatcaggatcaacagaactatcatctcaaagattcctgctggaagcgatgtgctgtaaaaatttcacttgagctttaaaataatcaacaataaaatccgctgcattatatcatgtgcgtaatcatatgatatagtgtagcggatttattatatttatgtcatattttcacatatttctgatttctgcaccagcttggtgcagcttacgaaccgactttatcttgcgtattatcttgcgtattttcttcctctattatatgtattttatgtaaaaagttcaatctgcagatacaaacctcttttaaaaaatgcgattttgtggtaaaatagcaaaaaagaaaatgcgattttgtagtaaatcgttgaaataaaaaatgcgattttgtagtaaatcgttgaaataaaaatgcgattttgtagtaaaacatcaaaataaaaaatgcgattttgtaattttattaggagaatgtcatgtttaagcgaaaaatatatgataaattattgcaatggaaaaaggattccgatggtaaaacagcactcttaatcgaaggagcccgtcgtataggcaagtcaaccatcgtagagtcatttggacgaaatgaatacaaaagttatataatcattgatttctcaatcgtctcaaaaaatatacgtgaactgtttgaggatatttcagatctgaattatctgtttttgcagttgcagctccaatacaaagtcgatctctatgagagagagtctttgattatttttgacgaagtacaattatgcccccgcgcaagacaggctatcaaatcacttgtaaaagatcaccgatatgattatatagaaaccggttctctgatttctatcaaaaaaaacgtacaggatatacttattccaagcgaagagagaaagctaaacatgtatcctatggattatgaagaatttttatgggctttgaatgatgaaacaactatccccctaatccataagctattcgattctcaaaaacccttcggagaagagattaatcgtaaattgatgcgtgatttccgtctttatatgcttgtcgggggaatgccgcaggcagttgatgaatatatcaaaaccaataacttccgtaaggttgatgacgtaaagcgtgatattctgaatctttatgaagatgatttcaaaaaaatagatgctactggaaaaatatctatgctttttgatgcaattcctgcgcagctaaacaaaaatgcttcgcgatatcaggtatcaagcgtactgacaaacaatcgcgccgataatacactggaactgattgcagagttaaaagactcaaaaactgttttggtatcataccatgcaaatgacccaagtgccggtatgtcaaccaacaaagacttaacccggtttaaactatttttatgcgataccgggctgtttactacattgatgtttaaagacaaagatttcacagaaaacataatttatgaaaaattgttaaatgacaagctaggaactaatctaggctatctttacgaaaatgtagttgcacagcttttaacgtgtaatggcaacgaattattttactatactttttttaataaaagttcgcgccataattacgaaatagattttcttattgccaaaaaaaataaggtttgccctattgaagtaaaatccagtggctataaaacccataagtccctggatgaattttcaataaaattttcaaaccgtattcttcaaaaatatctcgtatatacaaaggatttctcaaaagacaaagacatactctgtctgcctgcttatatgatttcgtttttgtaagaagaatactttttaaatatgattttaatacacacacttatatggaggactaagacatgaaatttatatcgtggaatgtaaatggactgcgcgcatgcgtccagaaaggtttccttgatttttttgacagtatagatgcggatttcttttgtattcaggagtccaagctacaggtgggacagattgaccttgacctgccgggctatcaccagtactggaattacgctgagaaaaaaggctattccggcacagccatttttgccaaaaacaaggcattatcagtgtcttacggcataggcattgatgagcatgataaggaaggacgtgtcatcacactcgaatatgacaatttctatctggtaacctgctatactccaaactcacagaatgagctgaaaagactgccgtaccgtatgcagtgggaggatgatttccgtgaatatcttaagactctcgatgccaaaaagcctgtcatactgtgcggtgatctgaacgtcgcacacaatgagattgacctgaaaaatccaaaaacaaaccgcaagaatgcaggtttttcagacgaggaacgtgctaaaatgacagagcttttaagttccggttttaccgataccttcagatatttttatccggatgccgagggtatatattcctggtggtcatatcgttttaaggcgcgcgagaagaacgcaggctggcgtatagactactttatcacgtcaaagcgcatcaatgataagcttaaaaaggcagcgatccataccgatgtactcggttcagaccactgccctgttgaggttgatattgaattttaaatttaaggttatgtatttttacaatcccttatgcaacaccctcttctcgagcttatccccatccagggtatactcaacagcattgtacgcaccgtctctgtatgcaaacgtctcattgtcatcctgataatgcacgaagctgcccttgcccggatatgtcagtatgctgattttatcctctgtaatgtcctctgtggagcggatttctccgtctgcaacagggataatggctcctgcttttatgaagaccggcactttatcaagtggtgcatctgctaaaatatatctgccgccactgtattttttgcctgtgtagtaatcataccagtcgccgtccggcagataaacctctcttgcctccttgcccggtgcgatcacaggtgcaaccagtacaaagcttccgagcatatattcatcggaaatatttctcacatgcttatctgcaggatactcgtatacaagcgggcgcacgataggtgcccctgtcttttcacactcatgtgccagatcatagatatatgggataaatctgtatctgagctttactgtctttctgactgcatctatcgtagtctcgtcaaactgccaaggctcctgcctgcgtgttcccatcgctgaatgatttctgaaaaacggtacaaatactgccgcctcataaaatctgacaagaagctccggtgtagtatcacttccgaaaccgcctatatcgctgccgcacatggcaagtccgctgactgacagattacacacctgctcgagcgaaagtgctatatgcgcccagatgctgtgattgtctccagtccagccaccgcagtatttctggcttccggcatatgcagccctggtaagtacaaacggacgttttccaccatcatttttcgcaagtccctcatatgtggcttttgccataaaatgtccgtaaatattatgaaccttttcatgtgctccatactcaaactgcacatcatccggcagtggtccgttgaagcttgcaggctcattcatatcattccatatgccactgataccgtgctcgagaagtatctttgtcttgtctccccaccagcttctgacgctttgctttgtgaagtccggaaataccgatgttcccggccagacagcattttcatatacactgccatctatatcatgtgcaaatgcatccatctccatgccctctttgtacatgaaataatcctcatcctttttcacacccgggtcaatgatggatatgagctttacacccctgtcagcaagcttctctgaaaggccctttacatccgggaatttcttgtcatcaaaggtgaataccctgtagccgttcatgtaatcgatatccatatgtatcacatcgcatgggatatcaagctcgcggaatttgtcagctatatcaagcacctcatcctgtgtgtaatagccccagcggctctgatggctgccgtatatccatctctgataaagcggtgtggtgcctgtcagtgatgtataaagtcctaccacctctgccatatcatttcccggcataaaatagtagtccagctcgcccttctcatgctcgacgaaatagtaatctgtgttttcataaccgaaatcaaaggttgtcttgtaggtattatccgcaaaaattccatagcaatattcatcgcccaacacgataaaaaatggtattgatttgtacagcgatttgaagctgtccacatgtggcgcaggatcatccgtgttccagtttacatatgaatatccacgcttgttgaggcatcccggcttatctcccagaccgtaaatagcatcatcctttccaagctttttgatgatggtaacagagtcagttttttcttcatcttttccgacagtatgtccctcaagctctgcgatggcaagatcctcgtacggattcttctcactctttttgcgtgctttttcataatctgaaagcacaagcttccctttgtaataaatatcaagcttctcgttatccttcacatatacagtaatattccttgcgctgatgactgctttaaccgctgcatcgcttacaccggcttctgctgcggtactcttggcatcagatgtatccttacaggtcacgtccggtgtggcagccttcggaataaagccctcttctattgcaacactttcgatgccgggtttttgtgcaacatgcactatgttgttttcaaatatggtaacaaacagactgccgttctcgtagatcagctctgctgtgttgtcctgtattttacagttcttatatgaatttcccattgcataatcctcccttgaattatatagtttctcctgatgtttcttataaaaatacttccgtttactataatagtatcatccattttttatttttacaacaaagaaagtcaccggccacacctagtatgaccggtgactgcctcaggctgtaagtatctctgtcaatacaccatacagctctgtatcaagttcctttgccttgagctctgataaaatcactgttgttttctttcccgatgtaataagaccgtagatttcatcctttagcacaaagcctatctctgcctgattcaggaaatcaaagcatcttttttcgatttgattatcaagcgctactgtgtctttcgatattgcaacgcttattttgctcgctgtcgatgcatttacagtaacgatgagctttctgttttctttatcatatttattctttgccaatacctctttaccatccacagatacctttaccttatcggctgctgtctcggttcttctttcaaagacaagcttataggttctgttgtcaggtattaatgatgtatctccatctgccggagaaatgacaaacatatctttatccgcagaatatttcataactgtggtcacacatctgccatccacatatccgcaggattcattgtcatcctcgtatagctcaaactcaccatcagcctccgggaataccctgacacataatacatcaggatttttgataacagatcttgcatcaagctcatcagcatctgcacacacaagtatgcctccagccttcgcaaacacaggtatgctgctcaaatccctgtaaacctccagcattcttccaccatcatagcgcatgcctgtatagatatcataccagatgccctccgggaaccatactttggtttttgccacattaagtcccttaatacgtggagttgtaacaggtgctaccataagctggctgccaaagaaatactgattctttacctcataagcctctgcattttcaggatactcataatacataggctcaatcagcggcatattctcggcatagctgcgatagttcatggtatacagatacggaatcatacaatgcctctgtctgagcgccgcctccatcgcttcctcagtctcttttttaaatcgccacggctccttgccgttaaattcgctgcatgagctgtgcagacgcattatcggagagaatataccatattgtgtccatctggctgtcagctcatcatccttgtagccaagcatatgtccgccaatatcatggctccaccatccatatccgatgtttgtcgctgtcgttgtaaaatacggttgaaaatcaagcgactcccatgtaatatgtgtatctcccgaaaatccaatcggatatctatggcttcccggacctgcatagcgcgaaaatgtcattggacgcttaccgtctcttttattatcgagataatgaaaatgattaaaaatccatagcggatccaatccttcaaccttgcagttgctgccctgctgccagtcaatccaccagaaatccacaccttcagcctctctcggatgatgaagatacttaaaatatgcatccataaactttgggcttgccggatcacatacaaccgggtcctcattttcatagtccacgcccatttcctttgccatatcaacatacatttcttcacagccctgcacaccatccgcaggatgtacgtttaaggtagtatgcattcctctgtcatggagctttccaagaaagcgcttcggatccgggaaaagctttttgttccaagtatatcctgtccatccgcttccgtatttagggtccacatcaacctgatgccagtccatatctattacagctactgtgaatgggatattcttttcatcgaatttgtccatcagctccatatagctttcttctgagtatttataatatctgctccaccagtttcccagtgcatatcgcggaagcatcggagtcttgccgcaaagcctgtaaaaatcattgagcgcctgtttataatcatgtccatatccaaagaaatacaaatcagacacacctttttttcttggctcaatccatccatcgtcaagtaaaatctgtgatttactgtcatcaagaattgaatatccaaagcgtgaaacgacaccgtgtccaagctcaacctctccgtttacgtcatcaagtgtacgcgctgtaccctgcaaatcatgcaccttctcgccataatgccagatgctgtgatatgcgctcaggtttcccttaatctgtatactcagtccgtgtgatgagaactccttctcattatatatcaggtgcagcattgatgtatgaacctcaattccatcagcgttacgcaccacatgatagccggtctttggaaaatccctgaacaatactgtctgtgttgccctatcctcgaatacgccatcttcactgtattccagacggacaagcgcctctgtcagtaatgtaatcctgtatttttcacctattatcatattgtccgataatgccaccggacttgtctttactctgtatatttcctgcatgaaatactccctctcatataaattacgctatcccttgacagccgatgccgcaattcctgcgataaactgcttctggaagaacagatatatcagtaaaaccggtatgatagatattgccgttgccgcaaaaagtgcgccataatctgttgaatactgtccgttaaacatcttcagaccaactgccaatagctgcttttccttggtattgattacaagataaggccacagatagtcctcccatgtccacaggaactggaaaattgctatacttgaaattccatttttcgccatcggaaatataatcctgtgaaagatataaaactcattagcgccatccattctggcagcttcaataatctcatcagggatggtctcaatgtgctgcttcatcataaatattccaaatccgctgaacatagccggaataataagtgccttatagctgtccatccatccgaatttctgaatcatagtgtattttggaataattgttacacaccatggaatcatcatagtagccaatacaaagccaaataggatatttctgcccttaaacttatatttgcttaatacaaaaccacagattgtactggtgtataccacaagcagggttacaacaatcgtgataaacaaactgtttccaaaaaacctcatgaaattgaaatgcgaattcatgctgatgtaattgtctattgtaaactcttgtggaagcagatgttgctgcaacgccattatttccttattctgcttaaatgatgagcatagcatccatataaacggataaactgtaacaatgcccaataatagaaggaatacatttaaaactatactgcttactttttttctcatgatattctcctcctactcttccttgcccgatactttgaaagaaagcacggtaagcactgcggtaatcacaaaaagcacaaatgaaagtgctgatgcatatccaaagttgtatttgacaaaggcctcatcgtaaataatgtaagaagccagatatgttgatgttcccggtccaccctctgtcatgatgagtatttgaacatatgcctggatatacgaaataattgatgtaatgactacaaaaagtgtcataggcttaagcaacggcaatgtaatgtatctgaatttctgccagccactcgctccgtcaacctgtgctgcctccatgacatctgccggaagtgagtacaggcctgccatatacatgacaaccgcatatccaaaatccttccagatggtcattataattactgcaatcagagcagttttgggattcatcagccagttgatatcgagcccgaatattttgttgatgattccaatctgtggattgtacatgaacttccatacaaatgccactgcaaccataggcgttactacaggcatatagtaaactgccctgaaaaagctcttatgctttataagcgttgaataaatagcatacgcgattcccagtcccagaccgactctgaaaacaattacaactaccgaaaaaattacggtattgaacattgatttgccgaacaatttgctcgtgaacacctgcttataattttccagacccaaaaacttgtatgttccgcttaacggattccactcatgaaagcttcctgcaaatgctataccgattggtattatcaaaaacactataaagaaaactaccatagctaaaacaactatgtttcttaaaattatttcactcttactttgtaatggacgtgattttttaaacattaataatcctccgtggtgaatctttacctgttattttgcaaactcatatagattctcgactgactggaatgaactgttcttcatatcctttataatatcagcctgtgccttgtctaaagctgtatcaatatccactccattgtagaatatatcctctccggcctttttcatatcctcctcaacacatgaaggcatcggacccggccagatgtagtggtcaatgtgctctgcaagtaccttaagcgatgggtttttaagtatttcctcattgtctgcaagggatttctttgcagggaaggtactcatagcaagattgaaatctacctgagactcatcatcgcagaggaaaaactttacaaaatcctgtgcaactgcctgctgatcctttggtgcttttttgtttacaccgaatgttgactcaccgttatatctattgtatgcatatggatttccgtcaaatgtaggaatttcaaatacgccaaaatctatatcgctccatgtggtcttaagtgtattgtaataatgtccccactgaataaccatcgccgactgtccctgtccaaagctgtctgcgcatttatcgccaaaatcctttgaaccaatctgatccttgtcgtacatatcaacaagcatctgcattaccttcttcatggcatccgaattgacattaggtgtctttccatcctccttaaagaggttctcaccaagctgataattaagaccaagcagataattctggtggaaatcattattgaaattgagtccggcctggactatattgtctccatccttgattgtgagcttctttgctacctcaatcatttcatcccaggtctttggaatatcatcatctgttagtccggcttccttccacatctccttgttgtaataaacagaacctgtcatcattccgtaatcaatgtaataaaccttaccatctatcacatgggcgtttactccattaaagtcctgctccaaatcctcaacaggaatatcaagcggagccatatagttgataagattctcatgatagctgttatgtacatcgaagagtgccggtccgtcctcaccatcgagtgccagaggaagctttgtccagtaatcttcccatggattatccaccaggtttatagttacattaggatgaatagctgtgtatctgtcaataaccttctgaaataattcatcgcttccccactcccacaggtcaattgagatatcctttccatcattaatctcaaccgaagggtcatacttcaccgtatcgccaaatggctttgttggtacctttatgtcctttttagctgatgaagccgatgagctgccacagcctgtaagcgctgtcactgccattgtagctgccataactgttgcaataagtttcttcttcatagaaatcctcactttcttaattcaatatcctctttttcgttcaaattagtttagcgctaaatctgactataatctaccaccaccttatacattcgtcaatagttttttgtttttttatcacttttcatattattttcatatgttttttgtgcatttttacatgtaaattagggttttgtctaaatatttgcaaaaaccgattgctatttgcaaaataaaaatgtatacttaagataatttataaacccatattttgaatcatattcggtttatgtataaactcatcattgtttatgttcaaacttattgtggtttatgtataaactttatagtaaaaaaattataatactgaatagaatggagtttaatatgacgcttaaggatattgccgaaatggcaggtgtgagcacaatgaccgtctcaaacgtaatcaacggaaagacaagccgtgtttcacagaaaacaagggataaaatcaattcaattatagaggaatataattatgttccgaatatgaacgcaagaagtctttcaaacaattcctcacacattatcggagttgttacattcttagaggagaaagaatatgcttcaggatacaattattttgagaacccatatgtcagtacaatgattggtacaatagaaacagagcttcacaaaaacggatacttcaccatgcttcaatcagtatccagaagctcagacatattatctttggttaagaactggaatgtcgatgggatgattctggttttccccacctctgcccaaaatcttgaaaagctgatggatgcagccaactgccctattgctacctttgacagcaattactctcaccctaatctcataaatgtaatatctgatgatgaaaagggcttatatttgtcgaccaaatatatgataaatcacgggcacaccgagattgcatttgtagctgattatgagggaaatatcgtcctcaccaaacgttttaacggatacaaaaaagctttggaggacagtcatattcctttccgtcctgaatatattttcagctatccaccttcatatgagggcggtatcgaagccggccgtgccattgcaggcagcaagtcaccaatcacagcagtggtaacaactgccgatatatgtgctatcggcatcatggagggtgcgcgtctcggcggttaccgtgtcccgattgatttatctgtcataggctatgataatttgaatctatgccagtacaccgtaccgaagcttacatcggtatcacaaaatgtaccaaaaaaagcccggcttgcaaccgagcttctcctaaagaaaatacatgacaatgaggcagactgtaatttcggtgagattatggatgttgagattgttgacagacaatcagttatctcgctttactaatccctgcgcacacgcttgttttcatacattttctcatcagcctcacagataatcttattgatatcggcgtatctgccgcaggcatagcctactgatgcggaaatcggaattttgctgtccttttggattggttccataatcttattccatctttcaataaagctaagtgcatcatcctcagtcccatccggtatgatcatgataaactcatcgcctccatagcggtatactcttacattatcattatcatttgctgcagccagtctgatggttcccgctattcttgctataagacggtctcccttcccatgtccgtatgtatcgttcacaaacttcagctgatttacatcccaatatatgacagctacctttcggtcaggctcctttggcttttcaaggtcatcaaggagcttatttttattgtaaaggccggtcatgtcatccattgcagcctctttcttgatacggtgcgctttttccattgttcttcgaagcattttattaacaccattgctgacactgtaaaatccgactgctataagcgaacgcggaaaaacataatacataaaaagagtaaacccgggatttttattcacctcattcagcaaaaatactccatccttttgaagatgctcaagtgatgtcgcagtaagcaataccatatttgcatcgcacactccaaaataatagcccacatatgtactaagcgctatattaaaaatcgaaaaagctaatgcaaatctcgacaggtgctttgatgaatatacacctgcaattacaatcggtaacatcacagctattatcatatgatatgtaagcgacgagcacgttatcatcaccagaaaacctgcctctgaaatgcacagatactttgcacaggcttgctccagtccaactatcatcagcagcacaataaacaccagcagaagaatacaggataatatatatcctttaacaaaaatattattatcaacaataaatatattaaggcagttaagtatgaatacaaatgtatatagcaaatgccatatcaaaagaatacgaaacacaaatatattttcaacaacatccttcttctcatatataggattatcatctgtaatttttgaaaacaacagctttaacgtctgcattataattccccttttccttttctctttcccttatctggtcaaatcctttacccacttgtatttcttaaaatgtatgagtgtccatggtatctttccaatctcatccacgcaggtgcacgcatacaccacaaccaccggccagttcaggaaatatgtacctgcaactgcaagcggtatcgctatgccccacatcgtaacagcaagagaatacatatcaaacatcgtatctcctcccgaaccaaagacaccgtttatgatgatttcatttaccgagcgtccgatcatgtagagggcaagtacaccaaacagctgcttcagataccctgctgcctgcggtgtgagctttacaaaatgtaaaatcaccggtgctgaaaccgccataagcactgtcataacagcgccacacaaaaatgacagttttgccattctgatgccatatgtttttccacgctttaaatttcctgcgcccagctcatttcctatcatgatgccggcagcgcttgatatacctgcactgagacagcaaatgatatcacgcacaaccgctgcgacggagttggctgctgccgcatctgttcccatgtgtcccataaatgtagagtacgatgtaaagcctatgccccatacaaggcttgctccaagaatcggcccggagcacttcataaaatctgcagacagctccctgttcctcaccaaaagctctctaattttaagcctgatatatcccggtctgtacgaaaaagtgattgaaagcataagctccactactcttgatatgagcgtggcaagtgccgctcccctcacattcatgctctcgatgccaaatgcaccatagataaatatggcattgagtattatgtttataagcactgtaattgagctgactgccgccgcagtacccgcgtgctctgatatcttcatcatgactatataacactgtgaaaaacctgtcaataaatatgaaaaagaagctattttcagatagcttacaccataatctataagcaccggctcgtttgtgaaaataagcatcagatatcgtggaaaaaatgcacatgccacgaaaaacagcaccgatactatgccacatatcctgattgcaagagcgaatatgtcatcgagcgcctttatgtcctgcttgccccaatactgtgctccgagtattgcaagccctgctgtagctgctgaaagaaacatgttctggatgaactgtatctgtgtagcaagcgaaaccgctgacatatagttctggtccagtcctccgagcatgaaagcatcagccaccgccaccagcgccagcatcagattctgcaccattatcggaaccatgagtgtccacagctttttgtaaaaatgtgtatcaaattctattgttttcatgtatcttttataccccttgattactgattattatcccaaatacaaacaattatatatggttgcattggcatatgtcaaatatatacataatatctgcagatatttcatccaaaaaagtgtgccgctatccccatcatcggtatagtgtgcaaggttcgtaaacccctgttcttttctataaatgaccataaaaatgacagggaatgtagccctgtcataaagtcagaaattgttccttcacttataggagaaattcgaggggataaacggaactgtttttttctaaacaatagtatgtaaatgtttacgacaaacttgaagttgtctatttaatacaaaatattagtaatttcattatattcctcatcggttaatactttgacccataagcagggctgaacatctacaaatcctgctttaagcattgtttcttgatctggactatcaatataatataatgcaggtttatcttctcccataacacgatatgtggcaagattacataaaactcctttgtaatgtactttcatagaaaattacctcttacctcagccttgttcctctacgcaaaatttcgattttaatgtctctattataccataatgatactattatgaaaaacaaaaaaattcaaagcttccgctcttttataatctctcagtattactggaatttgactttataatttgtattgcataaagtttccattatgaacaaatccatacgctttatataattttacccccatatcagaagcagtaatctgtattgaaccacagccatattttcttgcttcctctataactctgtgcagaagctcttttgcaattcccatccgtctgtaatcaggttcagtaaacatacttgataacagtccaatttttccgcttgggcaactgaaatatgggggcttttcaacaaatgacataccgcttgttccgattatcttgttgccgtcaacagctatccaagatacgaatgtaccttctgtcatatgacgactataataatcttttaaggcaggttttaaatcaatatcttcttttgcgccttcttctcttaattgatttattctcatttcaataaaaatatccagttcattttcagtcaatctcttatattctattgacaattcattatccctccaaattcaaatctgtctatcagttccctttataatttcattatactctcatctattgggaagcacaaacattttgcgtctatcgttttactcttccttttagtcaaaaatagagccgcctgtactttggcggctcaaattaccaatttatgttttattgactaaactaatacaatactattctgagaattgaaacgatataaagtatatgtaatcattttgttggtcaatttctccttgttcaatattttgaataggcgttgtgctcagaccatcttttccataaataaatgctgccaacccttgctctgaatttttttgaatcgaaacttttccttcaatttgtgttgcggatcttccgtaatattctcttccttctactttttccagaataggaatcgtcgtagaatatttggtcgacgtgtctgcaactataagcttcacctcaaattcctcaaaatccggtacaagtacaatcttaccttccgtcggagattcaacctcttcgtaagataactctgcaattttattttttgctgccaattttccaaaatgatactctgatataaatatggtcaatgactgaaacttctcatttgtgtgataatcgaataaaaaggcaccatccactccagataataactctgcggttttcatctctgtcccttctttgtctaccgctgtaatataattctttgggtaactacatttttgaacaagaatcatcccaagtgaaaatgatgtaatcaatacaatgagtgctagtcctattattgatcgttttagattttttatcttatatttactatccttggcaattcgaattaaattgtcttctgatttttgtatataattttcttccctaatatcttctcctgcaaaaaactcatttatgctgattcccaacatatcgcataacgtaatataaacagatacatccggcaaacatatccctcgttcccattttgaaacagatttgtcactcatcccaagtttctccgcaacttgtttttgggttaatcctaacgattttctcttgtcagcaatatattttcctgtttttatgagatccatagtatccctcctttaagatgatactaactgataatctaacattttaacaccccttagaagtagaataagcatgttttatgaacatacagcctatcaagatagccagttttatctatatcgccaaatccaacgagcaaattttcctctactgcaacgagagtataatgttgtaaaaaagaactattccatacatccaaatcatcatttccttttcatctggttttgattctgcccgttaacccctttacacttttatgatatctccccatgctgcgcacagtttttcaaaggtccatgccgcatttgcagggcttgtggacggcagcgtgactgcctccatgcctgtcagcggaagctgatatttcttataaagtgcccctgctttatttccgtttgcaatgacctgctttatatcggctgtggcaagaattttccttatatctgtcggttcgacgtttttgatgctgttgtcgctcgaacccttgatatcacagctttgtatcacatcccatatggctatgtggtttttaaacagcatatatttcttctcatctatcgtctccggcaccggttcatccaacagatacgcaagcagcttccaaaaacggttctgcttgtgtccgtaatagaaattgttttcccttgatgcaacggacggcagagtgccgaggatcagtatgcggctgttttcatcatagacaggctcgaaggagtgggttatgtgttcgtattccatattgttacctcttatatctgcagcagctcttccagcttatcaatacattttaactatactacaatgccgttgttttttacaacaatacgcatagttcccagaaaaataacttatgattattatactttatccatcttgatttcacaatcttttgttcacgacaaaaaagtagtcgtttcacttccacattttttgacgttataacccattataacccattgatgtttcactcaaaatgggttataatagattgtaagaaacggggtgatattatggatatctacaaacgaatttatgaattagaaaacgagatagcagccttaccacaaggttctatcaacatgaagaaaatttacggcaaagagcagccttatctgcaatggacagagaatggaaaaagcaaaagcaagtacattaaaaagaacgaacgcgaagaaatttttgcaggtgttgaaaggcgcaaacagcttcaagaagaattgaaagaactgaaacaacacagttctattgatccatctaaatctacagattttgaaacttctgtcattatcggagaacgtcttctggcactgacaaaaggtgtaaaaaactggggaaaacgtgattgtttcagacagttacaggcatatttaaacagtgaggaaacagatcgtgtatgcttggtatttggtctgcgacgaacaggaaagacaacaatgctgcgtcaggctgttttaggaatgactccatcacagtccgcaaaatcagcatacatcaaagcaaaagggagcgataccatggcagcgatgaatcgtgatttgggcaaactccttgatctgggatatgaatatgtttttattgacgaagtaaccctaatgcccgactttattgattcagcagcactattctctgatatctacgctgcacaaggtatgaaaattgttttatccggaacagattctcttggcttttggtttgcgcttcatcaggaactttatgatcgagctgttacgattcacactacctttattccattccgtgaacatagtcgtttactcggtatcgacagtattgacgagtatattcgctatggcggcacacttcgtgcaggagaactggattttgatgataaagacgttatttcagaggatgcttcgttccgtgatgacgaatccacacggcgttatatcgataccgcaatctgtaaaaatatccagcactccctgagttgttgtcaagacggaggatatttccgtcatctccaatcactctatgaggcaggtgaactaacaggtgctatcaatcgaatcattgaggatatgaatcatcgtttccttattcgtattctgaccgacaaattcaaatctcatgatttgggttcagctgctgatgttttgcgaagagatcgtaatcccaaacagcgtacagatattttggataaaatcgatacagaagcagtaaccaaacgattaatggatatgttggagattcacaataaagaagaacaatctattggtattacaaatgctcacatagaggaaatcaaagaatatttgaaagcacttgacctgattgttgacgttccacgagaaacggtaattccaagtgccgaaccactagagaatattttattcacgcaaccaggcatgcgttattgccaggcacaggcattggttcattctttgacaaaagatgaattattctctacattgagcgagcacgaaaaaatgttagtttctgaacgtattttggaagaagtgcgtggtcgtatgatggaagacatcgtacttttagaaacattcaaatcggctaaaaggcatcaacgtgttttcaaattgcaatttgctgtcggcgaatacgatatggtaatttacgatgctaaactcaatacatgtgaatgctacgaaataaaacacagctcgaaaattgttccaatgcaagcccgcttcttagttgacgaagagaaactgaatcaaacaagtcagagatttggccagattaccaagcgatgtgtgctctatcgtggtgaagattccgtcatggaaaatggcgttgagtatcagaatgtagaaaattatttgaaacatttataattttcccctaaagaaagagaggtccatgacatttaacatcatgaacctctctttctttattatcctctatgagccatccacttcttttgcttcttccagcaacggctgtagctcgtttgcttgagtgcaatataaacaccagaagtacaggttttcaaagctaattcatgaaatcgtttacacatacttaacagctgataaatactggaatgttaataattctacgcagcaaaaaaggaaccggaaaatccggttcctttttgatatcgcatcttttatgataaatatattctaactgcttcatataagtaatacacaaatcagctcagctctatctcatatgctccggcttcaaaatccaccgtaagaagcgcatacgcttcaccgttatcatagcggattgagagctttggtccttctcctgctactgttatgacagcccccttctcaaatgccttatgtgtatttctcatgcgaagcagctcaagctgctttgcaacaacatccttttttagcgcctccctgatatcggaggcactaaggtttgttctgttaatttccttgtgtcctgattctccggcgcgtcttacggcctcatggtcatttttgcctgcaaagaggtcaagataccatacctgcggcttgcccggcataaacatctgaatggcacgtgccagaagcattttgctgtcagactcaccaagcgcactgtaatatgtggcattgacctgataatatatattcttctgtccgtgaagatttttgaccatgccgccacgagatacaatcaaatctataagcgagcgtatatcatcctccggaagcagaccctttaagtccagaagaggtatgccgtcatggcagccaagcatattgactgttgagattttatcttccacaatctcacgcgcccatttcgccagataatctgctctcctgttctcaatcgcatcaattatcagtcccggtaaaaagaaatcatatgtggcatagcccttatctgcaagagttttgtatattttttcctcatatgccgcgtgtatttcaggcagcagagtcagtccaagcggtgctgcaagctcgtgaatctgctgtagaaattcccaggtctcaggatcattcagaaaattcttttttcccggtgccttaggcgcataggcaaatgcatcgagtctcacgatagccgcaccgtaggatgctattttttccagtgtttcacgatagaaatcccacaccttttcggactttatatttaaatccatctgtcccagatactctctgccatgcacctcctggtaaaatgtgttccagtatggcactcttcgtccatccggaaactcaaccatgagaatcggaagccccggctttctgaaaaacatctgctttaagcatgactcatcaggctgtatgtagccctcatccgtcatgactccatgaccttcccagaatttgttccagtctatgaaaaagtcgcggtactccgactcatcgcccttttccacaagatccttgaactgtggtgactgtgccgaagcatgatttaaaataaagtcaagctttaagtcaatccccagctccttcaattgcgataaatcctctattgtcgcaagctcctcattcagattgtagtccacgaccgaaaatccgcggtccaaatccgaatgatacagacttggcagaatataaaatgatgaaaatgtgtcctgcatttccttcttttttagcagcgctgcgatatcggaaagcttaccgcccagactgtcaggatatgcattaagcataggtttattgttcatagactttgccatcctttccaactacgatacgcgcattttttccctgtaaatcaagcttttcctgctccaattctaccacgcggcatatgaaagggcttgcggcgttttcgtcacgtcctctcttaatgcggcgcgcctttgtctcctcaggcgagctctccagaaatacaggtatatcaacacccttaaggtattcgcttcctccatgggtccactccaggatgagcactttaattcctgtgaaatcagtctcgtcatatgagatatcaccgtcctcgcggcccatatgctttatctcaattatatcttttcctgccttaaactctgaaagctccttgttaatcctgtcaaagtcaatctccttaggtgttccaagatatccacgtaagccatcctcgccggactcgttatacacattaaggcgttcctcgtcgtttctcatcgggatacggtgtggataattgtccccggtcagcacatagcaggctgtattatcgttaagaaaatactgctgcagggctgctgcaatcgttgtctttcctgagcctgagccgccgtagatgcttattacaatacggttatcagaagcactatctgcagtgtcagcctcatttaattttagattgccgcacaccttctttatctcatcatacagcttctttgcctcatcaagcctgataaatgaaaactgatatgcctcatactcctttacggcaaacggaagcggtattccggcattcatcagtgctgcacctgtgtactgcctgccggtattttcctcaatatatactgcatcagactccaagcccttaagcttcacatagcatgctgccgcatttgcctctgcatacagacgaaccacgctcacaagtgccctgtcctttgcccttgagacagacatccacgcagccacctcatcctcaaatgggcttgtaaggcgccagtaggtgccctcatttataagcatctcatacttcttaaaggtctttatctgctctctgatttcttccttttcctcatccgacagaagggccggattcagctcatagccaaaggttcctgccatggctgtgatgcctcttgttttaaggcttgtcactctgcctgtctgatgatttggcactgccgatacatgcgctcccatggatgataccggatagaagaacgatgtgccatactgtattcttgtacggtttattgcatctgtattgtcactgcaccatatctgtggactgtagtagagcatgcctgcatcaaatcgtccaccgccaccgctgcagccctcaagaagtatatccggatatcttgtcaccagacgctccataaaatcatacactccaagcacatagtcgtatgcaagatttcctgcatacacatcagccatgcttctgttcatatcccacttcacgtaatcgatttttcccttgtcaaacactgcgcagatctgatcgaaaatattgtccctgacttcttttctcgaaaagtctaaaataagctggtttcttgagcgtacaggaagttttcccggaatctggatagcccagtcaggatgctctctatacagattactatcctcattcaccatctcaggctcaatccatattccaaatttcactccctgtgcatgcactctgtcgatgagctctgaaagcgttccgccaagctttttctcattcacaaaccagtctccgagtgatgaattatcatcatctctctttccaaaccagccatcatccatgaccaccatatctatgcccagtgatgcggcctcctttgcaaggtctactatcgtatcgcctgtaaagtcaaagtaagcagcctcccagctattgatgagcaccggtcttacctcatgtgcaaatctgctcctgcacacatgctcactgatgcaggtgtggtactgatgggaaagctgtgagaaaccgtctgccgagtatgacatgatcacctcaggcactgtaaaggtctctcctgccgcaagcggatatgaaaacagttcatcggaaagccccattaaaaggcgtgtctggttaatctgatccttctctgcctcacatgagaagttgccactgtatacaaaaagcataccatagcagtctcctgcattttctgtagtatcgcgctgtgcgagaataaccgccggattgtactggtggcttgaggttcctctgcggcttccgaatgaaagtgtgccgtgtcctaagcgtgtgcgctcaagattgcgctccatggcatgcttaccgtagaatctgatcacatcataatctccgtaaaccatatccaggcaggcagcatgagccttttcaattgtaatatttccactgcctgtatttttaatgagcacacttcttgtgatgacatcacaagcctcgagcacgccataaagcagatgcacctcaacgcctgcgatatcatcgccaagaactatttcaagagtctgtgcctcgtcatcagatgcccacaccgccggaagtccctttagagcatattttccgtctctgatttcatgactcttataaagaagctcaacactctccgtgccatgttcatttttgatatcaagcgcaatatttctgaaatcgcctgtgccaagtgtcggatactcctgtggcagtgtatcaagcgaatatgtacggttcatgcctgctgcgtaaggattgcctgaaaagcctctgtcagcatatgtcagcacatagtccatatcacatgtgttttttgctccgtagtacagatgcagcagatagccaagtctgtccacctgcatctgatatgtggtgtgagctgtctgtaaagtaaaaattttcttgtttggattaaatataattgccataaaatcactccatatcattgttaaaatagtgtttaaaaattatcccttgattgcaccgtttgcaacaccgtttaatatctgcttctggcagattatatagaatataagtatcggtatcaaagccagaatatatgatgcaaatgccagattgtagttggttccaaactgtgtctggaaattcagctgtgccagcggcagtgtattctgtcctgttcctgacatgatgacaagcggtgtcatgacatcattccaggtaccgagtgctgtcaggatggctactgtcgcatgcataggcttcatcataggaaatacaactctccagtatgttgtccatgtgcttgcgccatcgatgtctgcagcctcctcaagtgccatagggatatttttcaagtatccactatataataatacattcattggcatgtaaaatacaagatataaaatgataactcctgccctgtttccaagtcccatctgcgcagtctgctttacaagaggcatcatgagaattgagaatggcacaaacataccgcttacaatgtaaagatatatgaaacggaagctctttttccttgccatgcctcgtccgataacatatcctgcaatcgaatggataaggattgcgagaacaatggtcacaatagtgataagtaagctgtttccgagagaatgccagaaatcagtcaccttcatagcctctgtgaagtttgaaaagctccactttgaagggaatgaaagagctcctgcgacatcatttgtcatctcactcggtttcttgaaggcaatgataacagccatatacagcgggaaaaatacggttaaggttcccaatattaaaacgatggtaagtacccagtttgttttttgttttttcattataactgctcctccttcttattcataacgcccatctggaatagtgaaatagccacaattacaacaaagaaaattactgcgtttgcactctggaagccaaactgtcctccatccataccatttctgtaaatcaggtatgagattgactcagtgctctgcgccgggccgccctttgtcaatgacataatctggtcaaataccatgaggaagttctttgtgctgagcaccagattgattgtaacaaatggcataacgagtggaaatgtaaccttccagaactgtttccatttgcctgctccgtcgagcatgctggcttcgtaaacatcctcaggcactgtctgcagtccggatatataaataatggtattcatggcaaccgcctgccataccccgacaatcagcacaccaatccatgcatatttttcactcgccagaatactgttttgtaagaaaccgatgttgaaggtatttcctactaccggcagaatatatgtaaaaataaagctgaaaatgtaaccaataaccagtccgccaaggatattcggtacgaaataaacacctcttaatgcactcttgccgcggatattgctgtttaacgcaactgccattacaaggcttaatacatttacaagtacggttcctgcaatcgcatatttaaaggtaaacagatagctctttccgactctggcgtcggtaaacaggtctgtatagtttctaagtccgacataatcatatgagccatagcccttgtagtttgtaaagctgtaaatcacaccctttatcatcggcagtgtgttgaatgcgaaaaataaaaccacaacaggtatcacaacggcccagaatgtcttgtctctatttgacattttctttttcattttgcatcctcctgttccttctggtaatcctgtacttcacgaatcagatctctgttgtaacgcttccagtctgaatcaaatttctttaagaacttctcctttgcattgtcgcctgtgtcaagcagatatgtctgaatcatggcatccacgctcatctcacttggataatgatgatcctgataatccgacatacggttgtcctttatatactcctgcatatccttcagtgtatccggtattgcgaaatctccatccttgcaggcaattccgccctggtcatccagatatgtctgaattgtctcatcgctgtacagatattcaagcacctcgtatgctgcttccttatttttgcaggccttcataactgaaaactgtaaatctattcctgaatttaacacattgtcagcctcattatcatttgccgggaaagtaaatgaaccgatattcatatcaggattaaccgacttaatctgaggaatagcatagcttcctatcgtgtacatggcagattcacctctggcaaaggctgtacatgcgtcattgtagctgtaagcatatggattgtcctctgcataatcaagtaatgtgcgtatcttgtcggcaaccggagaatatgcctcctcaaatgttgtatttcccatatttacctgattacaggtgtctgaatcacaaagacctactgcaagagcattccacggtgccagacatgtccatgtatccttaaagcccagatacaaaggaagtgttccgctttcctttatctcatcgcacagtgctgtaaactcactccaggttgtaggcaccttccagccattctccgcaaacatatccttgttgtaaagtactcctgctgcatttgcggcgtaaggaagtgcataggtgccatcctttggaatgaactcaagctccttgtccatatccagatatgcctcttttacagtgtccactacatccagatctgagatatcctcaaacaaatctgcatccaggaaatttgaataattgatatctccacctattgcaatgatgtccggataatcctcacggatgaagcgtgtctttaaaatagtcatagcctcattcggagatgagatagtcagatgaatatcatcatgagtctcattaaattgcttctcaatcttctcgaaagccttaacagcctccggcttataagaaaccacctcaatctcagtttttccgtccgcccgcttttcatttccacatccggtcagtcctgtcgtgcacattccgagtgccagcacaaccgccatagcctgacaaatctttctttttgccatattttttcactccttttctgttttatttgctctttttcctgataaaccgattataacataccattatgcatacaataaatacccttatttttgcttttttatatcaatatgctataaaatatgctataattgcatataatgtcgcataagggtatatttatagtattaatcaataaggagtgactcacatggacaagctttccttcaatatttttccaaatgtaaatttcatagatttgtgtatgtaccagttcggccacgagcagtgcgaaccgggacactcatttggtcctgccacaagaaaccactatctattccactatgtactgtccggcaccggcactctgatggccgataatgcaaagggcattacacaaacctacaacataaaaagcgggcagggctttctgatttttcccggccagataaatacctatatcgcagatgacaagcttccctgggaatacatatggattgagtttgacggtctgcgcgtcaaggaggctctcaccacaacagagcttaccaaaaataatcctgtatatcacacacactcaaaggatatccgcgaaaagcttgttgaggaaatgctctacatcacaaaacacccctcagaatcaccgtatcacctgattgggcatatgtacctttttctggattatctgatgcagtcagccaaatcatcaaaactcgttccaggtgggaaaatgagtgatttttatataaaagaagcgatgaattatatcgagcagaattttcagaatgatatatcaatcgaagatattgccggagtctgcggcataaaccgaagctatctgggcaaaattttcaaaaattccgttggacattcacctcaggaatttctcatgaattatcgtatgataaaggccacagagcttttaaagctgacctccttatccatcgcagatgttggttctgccgttggatacgaaaatcagcttcatttctcacgcgcctttaaaaatatctacggagtggctccgagggagtggaggaacgagcataaataagctcactgttcatccttcacaaattcatttacattgtcatgggtcaccttctcatacggcagatacacatactttttatcctcaaactttatgtttttcatgctgcccccggtggctgccagataagcaagctgagccatagccattgcctgtccctccttgtcattgtagactgttgccgcaagcttcgactgctgcactgcttcaagcccatcgtctgtgccgtccactccaaaaaatgcaggtacattcgactccgtcacaccaagcttttcgtatgcgtctatcgctccgagtgccattgcatcgttgtttgcaataaccagctctatgctgtttttatactgacctataagctgtgtcatacggttctgcgcctgagcacgattccagtttgctatctgacagctcagcttttctatctgaagaccgttattcttcatgctctctgtcacactctctgtcctgacgatggcatcctgatgtcccatctctccctccaggatgacgtactgtatcctgccatcaccgtttttatccacacccggattattctttatataatcggcaatgagttccccctgcatctgacctgactgctttgccttggccccgacatagtacagcttatcccagcgatttaaatcctcatcaaccggctccctgttaaagaaaataatagggatgtcattctccattgcagcatttataatatgcgacaaatctgttctgtctgccagattaatacacagcacattgcagccgtcctctatcatctccttcacctggtcatcctgtgcacgctgtgagcctgcagcatccatgattgtcatgctgatatcgtatttgtctgtatcaagacttgcgcactcctttttgaaagtttctatcagctccccgataaatgtatccttctggtcatagcatgtcacgcctatatatatatgttttttctcgtcaactcttgtgttgctgcacgagacaaatgacaatatcagtgcaaaacacagtatcatcatggtatttcttattctgcttctcatttattgttcccccactactggctgattgcatacaaaagcttcttgttttcttcatcaaacagattttttctggtaagaagctggtaagataccggcttttcctctactgaatattttctactgccacgcagcatatcgaccagccctacaacacttttgtatccggcagcaaattcatcaggtgtgataagagcctctgcccagcccgaatcgagataatatatagcctctgttgagtttcctatcccatataccagtgcaccctgcagattattatcagaggcttcctttgccgcctcaaccacacttgcatcatctattgcaagaactatgtcaacctttctctgtgacagcagatttattttctccccggtatcagaaacacctgatacaatccacatcacaacacagccgctctccgcgagagtatcctttatgccatcaatgcgttttttgcatgcatcggattcagtgttttcacaatagattcctatttttttacctgaaagtgttccgttgttgtcagcaagaagcttttgtgccagtttggcacccatgctgtactggtcaaactccactgtatttaacgacttaaagctctcgcttcccgcctggtctccgacaaccattatcggtgtctttttatttatccggataagtgtattaaggcttttttcttctgtcattttttctgctgtcggcttgaaaacgaccgcatcagcttttttgtttatctcctggtttatgacatcaatttcatctgacatgttgttcagattttccttacttatcataactacatccacaccatactcagaggccgccattttcatgccatatttaaacgcagcactgtggctttcatccacatcagccatcacaactgcaatacgctccggtttctcattgagcttattgtatgcgataaaacctattcctatcacaagtagtactccaagcagcagctctgttatgatgaagtttctcttattcttactcatatttgtccatttatttttcactgtcactctcacacctcccatgcagcaaggcaattgtacttgcttcatactatatgatgctcctcaaattgaagtctgttttcctctgaatagacaattgccgggattttgattgtcacaactgttccctcatcaagctcactttctatatgcaggccatagcgctctccaaacagtatctttatcctgttatttacattgacaagccccactcccgagccattcttgtgaaccctgtccgtatttgtcagcaaaaacggaatttcattctccggaatgcccattccgttgtctgataccgttatgatgatatcctctcccactttctggcctccgactactatctctccgaaatcgtccagctctctgattccgtaatttagtgcgttttccaaaatcggctgaagcaccagcttcaccgcacagtagtccattatttcctcgtctacctcaaagctcacctcaaatttgttcttatagcgcaccttctgaatattcatgtagctttttgcgtgcaaaagctcatctcgtacaggtattatggtatgtcccttcgacagactgatacggaaaagctttgcaagctgcgtaatcataaacgaggcctcctcgtttttgcctccttcaatcatccatgtgatggagtcaagagtattatacaaaaagtgcggattaatctggctttgaagcacatcaagctcgctctttcgtctctcgttctgctcccatacgatctttttcatgagctcattgttctgcttatatgaattgcggatagagtatcccagatgccgtatctctgaggaaccacctacataaatatctgcttcattgccattctcataccttttcacagaatcatccagcttcattatcggctttgaaatacgtatagatatcactctgtttatccacacagacatcatagccataataatcattataacaaaaacaaactgcttcacatccgccatcttattggtaaagatggagtatggcatcacacatacaagcttccagcctgtgtagctgattgtatctaccataatcttacgatgcactccattcagataatcatcatatatactgttttgcgactttgctgcaacctcgctgttttccggaacatctccatcaaactgtatctgatgcggatggtaaatcatattgccatttgcatcacacagataataatactgtccttttcccgatgtatttatcctctcaagcatccttgatacactcgaataatccatgtccacaagcagcacacccatctgtgattctgaaccggaggtcagctccacggcacggcttgatgatatgaccagatgatatctcatggaaccatcgtcaaacagattctgtacatgaggtgttgaaaaatgtatattttccatgcgctccatagcttctatgaaccagtcctgttttgtcacattcgggtcctccttctgggacacaacaggctctgcagctataaggcttccatactgattatacaaggcaatactgcgcagatattccttgtttgactcatagagcagactcatgccatcgtgtatgctgtcagaatgctttaaaatgtcattctcctttattacattataatacgccgcatccgaaacctgcctcatattgaccagatagctttccacactgtctattgtctggtccatcaccttatgattgctctctatgatactgtcctgcgatgcatcggcaaattttatatacatcaccacaactgtgacaagcattattgcaaacgacagcagtgagaatgagagcattattatggattgtatattgcctgatttataccttattcttctcatactctgtcctgtacctggatggggaaaccccatactttctcttaaaaacataactgaaatagttcggatccgcatagcctacattctgggctatgacatagctcttgtcgtctgtctccacaagcattctggcagccttgtccattctgtaatcagtcagatactccacaaacgagctgccggtttccttcttaaacagacttgaaaaatacgagttagatactcctaattccttacatgtatcgtcaagtccaagatccacacttctgtaattcctgtgcacataatcctttgcactgtctatgagtgacttcttggagttgtatctggcatcagccatatcatcgtgcagcctgcttgaaaaatccaaaagccactgcttgagcaccaccggctcaaaattggagagctcattataaagcctgcctacacttcccgatatttcctgcgcatttagctcattattgctcatgaagtgatatagctcactgatcagctccattactgccacatggtagttctcaagtgactgctgcgacataaaattgtgctgcatatacgcttcaacagcctgctctacatcctctatcttgccgatacaaatcattttaaataaatatgacagctcatttccctcatcgccatcctttgatatacgtcgctgtggctcaacctctgtcatgtttattgccctgttgctgccataaagcaccctgtaggatactgcctccctcgcactctgataagagctcaccagctcctgtacattttcgcacacctgtccgattccgacagttacctttgctcccattacatgatttacatatttgcagaatctgtcgcactcatctgtcaactcagagatatcctcctgctgcataagctgagctatcatgaccgtatcaccgagatagttaaaaattctgccattccagcgctcctttaaatcagcctgtgcctgtctctctactgacactgcaagcagtctgatatccatgccctgcggcatctgacttgcggaggtatgtatgataatacagcagtaatatggtccctcaagcacaatcttatagtcacgcatgtacctgcccagctcattttccggtattcgtccctcgataagtgtcgtgtaaaaatttgactgcaaaacaggcagcgatgctgcataatactgcttcaatatgtctgtgtttttcttctcattcagctcatcatccagctttgtcttaagctttttgaatacctctgtgatttcagccagattgagtggctttaaaatatactcctctatctcgagatgcacagcctcctttgcatactcaaaatcgtcaaatcctgtgaatagcaatagcttcgtcgcaggaaacctctgcctgatgttactgcacagctcaagtccgtccatgtaaggcatacgtatgtcagtcatcacaacatccggctgcatgtcctccatcatttcaagcgccttgaagccatttcccgcatgtcctaccacatgaaaaccaatctgctcccaggatacctttctctcgattacctctattacatcctcttcgtcatcaaccagtaataatgtatacattttatgtcttctccctgctataactggtaactattctgaaccacccacgcacattcgcaaaaccgcacgatactcgtgctttctcgctgctacgcagctaattttgctcatatgtgtgggggtggctctattcgagccaccttgagaacaagaaaatctgctgcttacatgcaagcatgacgcatcagcttttcttattctcagtgtttctgaatagttactctgtttatattatattataccacatctgataaattcttttgtagctttacataaataaaagtgtaactgttaaagaaaaaagcagagatgccaccctgacatctctgctgatcattttggaagtatgaaaaagaaattttcttgcgatattatttcttctgaacgtatttcagacagtcaagtgtaactgctacaagaatgataattcctgagaatacgaactgaaggtttgtatcaataccaaggattgtaagagagtatgtgagtgctgtgaagatacatacaccggttacaacacctgatatcttaccgataccacctgtgaatgatacaccaccaactacacaggctgcgattgcatccatgtcccagccctgtccataagctgctgaacctgaaccaaccattcttgcacactcaagccatgagccaaatccataaaggataccggccatcacgaatgcgccgagagttactgcaaatactgagatacctgaaactgctgctgcctccgggtttcctcctactgcgtagaggtttttaccaaatgttgtcttgttccagataaaccatacaattgcgattgctgctactgcccagatgatgatggttgggaaaccatttacctttggaataatcatgttagggataaccggctcaatagcaccgaatgaaactccctttgtagcatatgttacgataccgaagataacaagcatgttggccatggttgaaataaacggatgcatcttaaacttcgctgtaaaaaatcctgcaatacttgtgaagaatgtacaaagcacgatacatgcaagtaatgcgataaccactcttgcacctgttggtactcctgtaaagtcaaatatatgaccgaatacagagcctgtattgataccctgatgcatgatgattgtggctgttgtcatacccataccaaccattcgtccaacagaaaggtccgttcctgttaagaggataagtcctgcaacaccaagtgctaagaacattctcggtgaagcctgctgaagaatattcagtatgttgttgtatgtcagaagaggtgtgcccttctttatcggtgttatgacacaaagcgctatgaatataagtataattgcaatataaagaccattctgtaacaggaagtttctcctattgaatgtatacttgtaattctcccatttttgtgcccttgtctccataaatgtgaactttgaaagacgtaacatatcaatcagatgatacttgtagctgtatgcctcatgctttctgtccttgattctctgatactctttctcaagctcaagcttctcattggaaatacgattcttgtgtacgtaattttcttcctttatctcagttctgtctgaggtctttgccagagcagccttatgctttttatcaagctctgccattctctcattatgagcagcaagtgcctctgccttttctgcctcacagcttgctttaacagcattgtaatactttgagtcaaagttttcctttaagtagctttcagccttggcgatgagcttagaaatctcatccttgttctttgcctcaacagcctttgcctttgcaagctctttctcacatgctgctatttccgactctttctcaccctttgaaagagtcttatctctcttgatgcctgctattgctgactgacactctacaacctttgtagttccgtcttttctgagttcatcaatttctttttgtattccaccaacatattcgtcgataggctggcgcagagtgtgctcctgctcagccgttaaaatcttactattagccatatccgtcttctccctttattataggtactttgcactgagtctcagcaactcttcctgattggtttcctttgtattgacaattcctgagagtcgtccgtttgacatgactccgatacgatttgttataccaaggatctcaggcatctcagatgaaactacaatgactgtcttaccctgctttgccatattgattatcagctcgtaaatctcatatttggcacctacatcgatacctcttgtaggctcatccatcatgaatatctgcggtcctctttcaagccatttaccaaagataaccttctgctggtttcctcctgacagagccgaaatcatatcctccggtcccatacactttgtgtgcataatctttatctcatcagaggtggcctttgtcatcttgctgtctgaaagtgccggtccattcttataagcaccgagatttgcgattgtcgtgttaaaggtgaggtttcccttaaggaaaagtccatttgcttttctttcctctgtgataagtgcgaagccataatccatagcctccttggcacaggtgaaattcataagctggttcttaaaatatactcgtcctgctgctcttgtcctgattccgaaaatcgtctcaagaagctctgtacgacctgctccgacaagtccgtatagtccaaatatctccccctcatgcacatcaaatgtgatgtcctgcagatgtggctcgtactttgtcgaaagatgctgtattgacaagattacatcctttggtttgttgtctaccggagggaatctgttctccagtactcgtccaaccatcgctgcaatcagttcattcatatttgtttcttttgtgctctttgtcatgaccagatttccatctctaagaaccgaaatctcatcacatatctcaaaaatctcatccatcttgtgagaaatatagataagtgaaataccctggtcacgaagcatcctcatcatctggaacagcttttcaacctcctgtaccgtaagtgatgatgtaggctcatccaatactataacctttgagttgtatgatattgcctttgcaatctcacacatctgtcgctgtgatactgacatatttttcatcggctgctcgagattaactgtcattcccagctttctgaataattcagacgcttcttttttcatgcgtccctcatcaatcataccaaatgaattgaccggatatcttccgagaaacagattgtctacgacatttctctcaagacactggttcaactcctgatgcaccatcgctattccattttccagtgcatccttaggacccgaaaagcttacctcttttccgtccagatatatagttccctcgtccttctggtatgtaccaaaaagacatttcatcattgtcgacttaccggctccgttctcccccatgagacccattacagtaccttttttcacatctaaattgatgtggtcaagaaccctgtttcgtccaaatgacttgctcatgccacgaatcgataagatgttttcattattcttatcgcccatacttcctgctcctaactctatatttgctgtcgtctgtatacactttattttggggagagatttttccctccccaactaagtgctttaaatacttttactggttcaaaagagctgtataagaagctgcattatctgtcttaaccatgttgattgcgaatgcatcgtactggcttggatttccaagtctgtttgtgatattagactctgtctgtccatcaccaccgatgtactcaacatcaagatttaagagatcatcatacttctgtaagagtggctgatatgtagagcttaagaagttatctgaagcattgtagatattcagccataccttctttgtagggtgctttgctgaatcaagctgtgttgaaacaggtgcccatacaactgttgaatctgtgaaatccttgtagttatctgctgtaactgctacgtttaatgcgtagtaagatctctcatcatccttgtaaacatatacatcatcgcttaatacgtttcctgcatcatcctctgtgccgatacctgtatcaatatctacaccatcgagtgcgtttctaagtacacgaagtgtgaggtaagcctgaacgtcagcatgctggctgattgttccgccatagccctctgcgatagctgctactgcatcactgttggcatcgtatccgaatgttggaaccttgttgtcctttgaccatgcattgaacattgacattcccattccatcgttgttagaaacaactacgtcgattgactcgccaaatgatgatgaccatgttccgattgcatttcctgctgtagctgcatcccatgtagctcctgctgagttcttcatctcctgtgaagcaagctctcttactacatagtctttgccgtttacagtaatcttgccgtcctgaacctcagctgcttttccgtctgagtttgttcctgccggagcactgtcaatctcgccgctcttgtctacgcctgttccaagagctttacgaacacctcttgttcttgcaattgaatcgttgtgtccgatatcaccgattgcaagtacatatccgataacgccatccccatttctgtcgatcgtatcaatgttcttctcgatatactcttttaccatttctccctgaagttcagctccctgattagcatcgaaacctacataataggtatccttgttatagttgagtgctgttgtgtcaagctctcctgttgagctgtttgatggctgacggttgaaccacacaagtggcttgtccttgtttgcaacatctgatgtcgttgtgctgcttccccctttctgtgtatcagaagaacccccatctgatccacaagcggccattgacgctgccatagcagctaccatcatgattgcaacaaattttttcttcatatatttttgtccccctttgttttgttggtaaggctagtatacaaaaatatttcgggaatcactatagaatatttttcgataaacattaaaaattttactgtttttcgtcatgtagacgaaaattttctagtttttattttttcgctacgtcatattgttcagcttcaacaaaaacgggctttccgctttgtccttattacttcctttgctccgtcactcacaaacattccaatccctcttttcttatacaaaattcctgcatccacaagtatatttatgccctttgccgctgtagacggatttatcgcatacagctttgcaagctcgtttgtgctcggcacgcgctcatcctccaaaagcacatcccgcagtatgtcgttttctatcatttcgcttatctgaatatagattgatttctcctgattcagaatttcattcacatgctccgcctcttttctatacaaatagaaaacgttatacgtatggctgtatgtacagtttacgtttggtatatggttaagtatgctgtacgtataaaatacttagaaccagttgtcagtgattgaatgaattacgggtacaaaaaagcaccatttataggtgctgaaaataaagaaaactataagcaatacttattgtagcatgtgtaaatttacacttcaatcacagagatgtgccaatattatgtcatagcataataaaagggattagatgaacactatctaatccctaaaggttatggtgtaacgatatttagtttctctattgcaacttcagtgtcaagtacattattctcaaagaaatagaaagtaatttcttgaccagcctctaaatatgtaatgtcgagagatgatttgttgcaatttaatgtaatattggtaccatcaaaaaaattatttttttgactgatatcaacacagatttttttttgagagttatctatggatgtgatgataccgtttgaatggaaccaatgagtattatcatctccggaaatagcattttcttccataatagaatctcctttcatggaaccatttttatgtatgaatatcacaacaattccgcttaatattaatacaaatattagaataagtagtcgcttttttttatccattaaaagttgtacctcgcaaatcagtccagtttccaaaatctaaatttaaatatcgtacatattcattccaaccatcaaagcttcaaccggaatacctcgaaagcaccagctttatccgatgctcaaggcacttctactccagcgtatttttttcaatcccgacagatacgctcctgattgcgttcctagagtactctcaggaacttcgtgatttctgcgactttgatgctgttccagatggttccaaatttacacgttttaaacaggacttcttgttggatttacgatcttcgaagacattggatttcgtaatgcttttattcctctccgtgcctatcctggcatagaacgtagctcgaaagaatgggaaaatacttacaagatccgtgtaaatgttgaaaattcaatcaaccatttcaaagatagttgcaacattgcgaatcgtaagacccagaatgagaaaacgcttcatgctgatttacttcttgccggaatcacccagcttgttactgtaattgtcgctgataagattcatcagtacaaatacattcggagtttgaagcccttgattgcctgattattaatatgcatataatcttttcttcgcagtttatctgggaaatcttttagtcatgtctaaatttagaagcacctacttttcatctttaagaatcctacgttgcagaattcttaccgctttttaatcaggagtgcgcacttgttccgcaattacctacttgttgtactttttattatcgtaactatccagaaccaccacacacattcgcaaaaccgcacgatatttgtactttatctgcactctgtttagcatcgctgctacacagctaatttcgctcatatttgcggtatggttgcatggttaaccactcaagtaactaacctatgaacttataatagataatataaataatattgtcaactgtatttttcttcatataaaaaagaccatacactttaattcatcttattcccaacagcactatggtaattcaaatgtcatcctctcccctgtcgcaggatggtcaaaaacaagcttgtaggagcaaagtgcaagctgctccctcacaccaccaccggtgcgtccggatttgcttcccgttcctgagttatttgaggcaggcttcccatacttggtatctcctatcagtggatagccaatatttgcaagctgcaaacgtatctgatggtgccttccggtgagaagctttatgtcaaattctgttttattgcattcatttgatattatcctgtactgaagcactgctttttttgccagcttgtctttttcgcttgtgattttagatgtattggtaagcttgtcgaaggagatataatctgtgagagtatgccatgccagatcatgattatcttctttattagcttcttccttatctgctcctgacactccctgacctctgcttgccgcacgataatatttctcggttgtatgctcctttatctgcctgctcaaggatgccgcggctttctgattcttggcaaataccatcacgccctctaccggctggtcgagtctgtgcactataccgacatagggcggctcatttttagccgccctgtaatttcttatgaagctctccatgtcctgctgccctatacgcctggtctgtgtagcaattcccgccggcttgtagcagacgataatgtcgttgtcttcgtaaatgatatctggttttcccatgttgtaactcccgcaaattgttattttaaattttaactgttcagcacatttacagttgcgatacgcaagcatatagccaagtgtcacctcacatacaaacgaaggcagcatcggtgtaaaataatagttacttatcatattttatcaacttagtgagttattagcaatgatatttaaaaactaattctgacaatttaatattctttttgcacattctatctgttcctctgtaggaggctccaccccatcaagctgatacggtataccaagctccttccacttaaacaccccaagtgtgtggtacggcagcacctcaaccctgtccaccgttttaagtgtgtcaataaactctctaagctgctttaaatatctctcatccgtggtgattcccggcacaagcacatgacgtatccacatttttttaccgttttttgagagatattgtgccatatcaaggatattcttatttgtctgtcccgtaagctttttgtgctcctcgtcatctatatgcttgatgtccagcatgaagagatctgtatatttcatcagctcattaaatttgccgaaaaacggttcttccacggtaaatggatttcctgatgtgtcaaggcatgtgtttacacctttttcctttgcaagcttaaatagctctgtgacaaagtctatctgcaaaagtgcttcacctccgcttactgtgatgccacctgtttgcttccagtacgctttatagcgcatggcggtctttagcacctcctgcggtgtcatcagctttgcaccgtcattttcgccgcatttggcccatgtgtccgggttgtggcagtatttacagcgcatattgcagcccttcaaaaagactatatatctcactcccgggccgtcggctgagccgaagctttctaccgagtgtactcttcctagtgtttctcccatgttttacctgccactcaaaatgtgttcaaatatactcaaacacatcgagaaattaaagtccttgcggatacttcttactgcttcgatgtgtatgctttggcgattgtaaacaatacgctactcacaagttcgtgtacactccacagtcgtaaattcctgcgatagcccgcagtacatacttacgtttgcgtttattatgcaacttcgtaagttaaagcatctcttagattaagagcagcattgaaatccctatcctcaacataaccacaatcacaacgatatattctatctgaaagcttcaaatctttcttgatagcaccacagcagtgacatattttggatgatggataccatctgtctacgactcttaattcaataccattttcatcacattttgctttaagcttggttctaaattcatagaacttctgtgacgcaacagcttttgaaagatgtctgttcttcatcattcctgatacattcaaattttcaatagttatataagatggcttggttttcactatctcagctattgatttattgatataatcagta

SEQ ID NO: 1682 - DNA, 148 bp, Unknown
  gut microbiota DNA sequence
acattcctgatacattcaaattttcaatagttatataagatggcttggttttcactatctcagatattgatttattgatataatcagtacggatattatctattttatgatgaagtctttgtactttgagcttttgcttttgtatatt

SEQ ID NO: 1683 - DNA, 194 bp, Unknown
  gut microbiota DNA sequence
tttccaagttcgagacagggctcaggccattgtttgagttattgaaaaatgcgtcagatgaggaaaagctgaatgatttaattacaaatgacgatatctttacaagggttgacgttgagacagtagcagctatcaatctatttgtaggaactgacattaagtatgatgaaaaggaagaggtggtaaatatgtgt

SEQ ID NO: 1684 - DNA, 177 bp, Unknown
  gut microbiota DNA sequence
tggaaaaacagctctgatagattttgcaggaaatacagcagcctgtggtgtgggagcactgggagaaacctttgactggccggtgcctataacaatgatgctgagtcttgcagcaggaatcacggtaagtatttcgggaaataagctgttatttaaaaatgcagatgggatagagat

SEQ ID NO: 1685 - DNA, 291508 bp, Unknown
  gut microbiota DNA sequence
gtgtaaaatccctctgaattagctatcacagcgtagtatcagatgggatttgaaatgctgaaaaaccttgtatttccaagcatttttaagcattagatgccacttcccgatgtcgtatcgggtctactcctaagcggaacgcccccggttcgaatccgggcaagcgcgccaaaaagtgccgaaaacactgtgtttttggcacttttactttttatttctcaatcatttttcttgagtgagttttattgtttttggggagtaaatcaaaatcgaacttttaccgttccccgacctaaatcgtgctaattgcgattagcagaaaatcgcctttttgctaatagaaaaaataaagctaaaattgaaccttttgataccgatatccgtctatataagcgaaaccggttttaatcactcatagacaaaaggaggcgatgatgtgaatgagtttgagagattgctggaagcagaacgtgtttctgtggaacggtttgtgagatttcggatgagttctaaggcggatgcagacgatgtgctgcaggaaatatttcttacagcgtatcagaagtttcctcagctgaagaataaggactcattcaaagcgtggatcattagcatcgcaagaaacaaatgcaatgattatttcagaaagaaagcgactcagtacgaaattctgatcgacaagttgacagaaaaggaactatcagacggcaggcacggtgtttccatagttaatactgtaagagaaacgctgagtttgctcggtgataaggataagcagatcctttacctttacttctggaaagagatgccgcagtcagaaatcgcaaaacaactgaacatccctattgggactgtaaaaagcagacttcatacagcaaaacaaaacttcaaaaataagtatccatatcgcaccgatatatcgaaaggagaactctatatgaaaaagttgcctgaatttattcccgaatataaaatcgaagcaagtaccgaagctccctttgcagtcaaatgggaagaacttatgggatggttcttggttcctaagctcggtgaaaagttgtcttggggtatgtacgatatcccgtcccgtaagtgcagccatatttacgatatgcaagtttccggtaaagcaaaggttcacggtatcgaaggcgtagagctaaccgcaagagaagcatcatactcagataagaacgatgtgatcaatcgtacctttgtggcccaactgacagatacacattgccgctatctggcaacactcagaaatgacggcgatgttcgcaattatattacattcctcgatggtgatgaatttctgcctaactggggatttggcgaagataattgcggtaatgaaactaatctggctgtcaagggagatatcaagaggaatggtacaactgttacaagcgccaacaaagattttctgttggacattgtaggacgttacaccgttacgattggcggaaagagctatgatactgtctgtgttatggacattgaaacctatgattgcggtgtagtatccgagcagtttctggataagaacggaaagacgattctttggcgcagattcaaccgtgatgattgggccatcgaccgctataagaagctgtggagcgagcagctaccggagaacgacagacttaccgtaaacggtacgacctatgttcactggtacgattgcattaccgattatattctctgacataataaaccttaacattgtacggcattagcaaacacgatttacgcttattgtcaccaccctaaaatcacgctttctgctaattgtttgctaatcaaacaccgtaaaacaacataaaatcagcagaaatggcgtaacacaagataacactttaaccttaaaaatcccctgacataaggggatttttgtgtattacaagggatgctgcttgtatttcccttagtatctcctaagggttagttgtgagttcgattctcgcagggggtgccaaaagcacagccgaaaagcctagtaaaatcgggcttttcggctttttttattttagttcaaagacaatgaaactgaaaaatgcagaaaacctcattagcaaattctccgtcagctaatggaaattgggactaatgtcgtccgcctttcaggtggactgcttgctaataaaaatcagcagggttttcgcaattttgctaatgaaaataccctctctgctccgatgaagaatacaggagagtgttgcaatcacttatccgtttgaagaacggtctgacagcacaaggcagacacaccgatggggttgatgatgttctctgcaaggtgatttcagccaagaaaagaaagctcaaaatcaaatatatctaaacacgaaaaaagaccgcctatcgatgtaagcggcctttgattgtttagatgtatttgacaaacggtgaattatccgtcatttattcgtagtcaattctctcgattttgaaaatcacaggtcttgtaccgtccgaacagcaggtaatcatttcattttcgtttttcatccagcccttcataatagaaccaccctgtaaaccggtatatatgtatcgagaaattgcatcccacgcttcggaacaaaacggcattttcggtcctccggctacagcatctgcatctccatctgtttttgtcagagtattcagtcccatatgccagaagtcatcacgctcatcatcacgatagaaaacgaactcatcgccaacattgtagcaaggacaggcacctgaatccggagcggcacaatatttctgctgtaattccggatacaacttcttgtccaaaacagtcacttttactttatgtttcattttatataccccctatacccccaaaaaaatcttttttttatacacccaaaatatgaataattctaccgtcgtctgttgacctcaagatgaggaaaatagacggtattttctatttctaaaaacacccccaaaaacgccctcccggttcaaacaagtgaaggggttaattccgaaccacgaaaatggaagcctttcatttgtattttgtgtattttgaaaactgaatacagatatctctattgcttatttaagttaaattttatttatactaatataaaaagaacaaaaaattcaactgtgaattagcactcgtaacgagtatcctattaacttaatgatgttccccaaaaatctttgcgtttgctaataccttgctaaaacgaatggaaaaacggcataatattagcagatttcaaaaaagaaatgattaacactataatttcggaaaagcctagtaaaatcaggcttttcggctttttttatttcctgctgtgtttggctgcttgctaattgctaatcacaggtttggcattttgtggtcaagaccaatcactttttctgtattttcacagttagcactttgctaatacgcactgcattatcgacgtattttcattcggtttttaacctgcttgcgaatatggtgcgttttgctaatttgcgcttcgctaatgaaatcaggtgttattgcaagccgaacagactccaaagcctttttgagtagttcgggattgccggcaagcaggctcgcaagtgcttttgcgtcaagcgcgggtgcggtgccgaaagccctttgcgtgcgccgtttcgtgctctaccgtttcgcctgtggggatcccgttctcatctacaatatctaaatattccgccatactatgcctccggtttttccgctttgatttgtctttattttcagcatagcacgctgcatggcgtttttcactcgtgcacaaaagaaactgcaagacaaattcggctccgtatgctataataagacacacaaaaaattctcaaaggaggaagcacggctgcgcaatttttttcgtcggcagccgtgcagaaaagacatgaacaatatcgaatggtttcgcgaagcgaaatacggcatgatggtccacttcggactctattccatgctcgccggtgagtacagagggcgccgcacaccttatgattacggtgaatggatccagtccgcctttgccatcccgaaccgcgaaatggaacagcttgcgggtgcgttcaaccctgtttattttaatgcggaggagtgggtaaagcttgcaaaagaatgcggcatgacctactttgtggttacctctaagcaccacgagggctttgctctgtttgattccgactgcgatgcatacaacatcaaaaaagcaacgccatttggaagagacctcatcgcagagttggcggaagcctgctacaagcacggtttaaagctggggctttactattcgcaggagcttgactggcaccacccgcacggcggcggctacgacaaaaccaccggctgcgcaggcacggcgtggtataacaactgggatttccccggtgcagacaacaaagactactccatctgctttaacgagaagatcaagccgcaggtgaaggagatcatgacaaaatacggcgatatctgcctgatctggttcgacaccccgggcgtgatgacaaaggtgcagagtcaggagctttacgatcttgtgaagcagtatcagccggactgccttgtgaactctcgcctcggcaacggcgtgtatgattacgtttctctcggcgataacgagattccggcagagcgtccggcagagatctcgaaagaacgcgcaggggacatgcagtccatgaacgatctgttcggcttcaagtattcgccgtataacctctatgagaccgcagccacgctgaacgacacatggggcttcaaatactacgaccacaactggaaaacacccgagcagatccttgcaaacaagcagaagctcaacggcatgggtgtaaactaccttttgaacgtcggtcccgatgcgctcggccgtattccgtcctattccgtcgatattcttcgccgcgttcgcgagctggaaacctaattgttacggtgagtatctgacgtataagccttctgcgaaaacagcacggagctgctggtcggcgcaggtgagagcggcgtttgtctgccgttcatgtcgcaaagcacaacagcatatgtactgacacaggccgcaggatagaaagcgtgcaggaagcaaactgctttgagatttgcattcacaaattctgtttgatagcaatctggcaaaagtgcaacaatttatcccttgcaaattcaaaatgcaagagatttgcgttgcactttttctctatctggtgcctgaaaattattcttcgctcaagtccgctttggggtttggctttttatttgtagccttatgaaaccgtgtgagcaacagaacgccgatcaaaataaatgccggaaaaaccgcggaaaacagcatgccgctctttaaaccgagttggtccgcagtgagattcgggaaagatgcggcgatttttgcatttccggagaccgcgccgctcactgcgcccatcaatgccgggcccacagagcagcccacgtcgcccaacaccgccaaaatgccgaacatcgccgtaccgcccttcgggtacgcagcggaggtcagcgagaacgtgcctggccacatgaggcttacggaaaagccgcacagcgcgcacgaaagcagagaaagccacgggttttcaaataaagccgtaccaagatagcacaaaatacatagtgcggcgcagaataccatcgcgcccgttaaatggattttctcgccccacacgccgtagattgttctgccgatgcccataaacaccgcaaacaggcacggccctaaaaggtcgccgatgaccttcgtcacgccgagcgcacgctccgcaaacagcgagctccactggctcatggcaagctcgctcgcgcccgcgcaaagcatcaaaagcagtgccacgaggaaaattttcgaggtaaacagcgttttgagcggcgttttttcttcttccggcacggtgggcatcagcggcaccttgaggaaacggaataaattataaagcggcagcaaagaccacaaaatcgggatgataaaccacaaatcctcgccgatcaagcgcagcaaaagcgtcgtaatgagcaccacgcccacctgtccccagcagtaaaacgaatgtaaaaggctcatcgcggaggccttcgcgtctcccgggcaggaatcgacaatcgggctgatgataacttcaatcaggccgccgcccacgccgttcacaatcgtcgcaaggacaaggcccacatacggcgcaggcagcacgttcggcagcgtgccctgcatcacaaggcctaaaaacgccagcgcgtgtgcgatgaccgctgattttcggtagccgatgcggtctacgtatttaacggaaagcatatccgtgatgacctgcgtcacaaagttgcacaggatgagtgccgaaatcagcgaatacgaaatgccgaatttgttttggaacagcacgaaaaacaggggagagagattgttcacaatgccctgcgtgatatacccgcggtagcaggcaaacacggtgcttttaaagttttgggtcttctccattcaactataccgcctttaataaaatgctaactttcattatagcggaagacccggcgaaattctaccgtgaatttgacggaaaaccacaaaaattccatacatctgccgaaaggaattccaaaaaaatgcggcgtaaaagccaaatccatgttgattttaccaaggaaatatagtacaataaaaccagacagggttttctctttcagaaaaagcctcaattcaatctgttattcttttgatttattcaattagaaggagtgttttaacatgaagttaggcgtacttaccaatgttgtaggcaacatgcctcttgaggacgcactgaagtatttcaagtccatgggcatccagatggtcgaaatcggctgcggcggctatccgggcaaagatcactgcgatccggaagttctgctccatgatgaagcaaagtatcaggagttctgcgataccatcaagaagtatgatatggaagtcagcgcattctcctgccacggcaacccgattcacccgaataaggaactggctgcggcttatgataaggacatgcgcaacgcagttctgatggctgaaaaatatggcctgcatcagatcaactgcttctccggctgcccgggcgattgcgagacctctcagtatccgaactgggttgtatgcgcatggccggacgatttcggtaagattctcgagtatcagtggaagattcttgttgattactggaagaattttgtagcattcgcaaaagagcacggcgtcaacaagatcgctcttgaaatgcaccagggcttctgtgtttacaacacggagacgctcctcaagctccgtgaggctgtgggcccggagatcggcgcaaactttgacccgtcccacctcatttggcagggcatggatccggttgctgttatccgcgagctcggcggcgacgcaatcttccacgtacacgcaaaggatacccgtctcgataagtacaacatggcaaagaacggcgcgctcgacacgaagagctatgcagacgaagcacaccgctcctggatcttccgcagcgtcggctacggcaacgatctgctctattggaaggacatcatcagcgctctgcgccttgtcggctatgactatgccatcagcattgagcatgaggatagcctcatgagccagaacgagggccttatgaaggctgttgagaccctgaagtccgctatcatcttcgagccgaagatgaccgagacccgttggatctgatttctctctgacaacacgtaaataaaaccacggcgcttcggcagggcaacctgtcggagcgccgcttttatgttttaacggtttgctttttgtccgtatgatacgtgcacagcttcaaaaacgggaacagcaaagcggcataaagccctgcacaaaccgccgtttgcagcaaaacaaggggaatacccgaaagcgaaatgcttttcaataaaaactgtgttgcattcgcggcaagcagtgcaaaaaacgccggcatcactgcacttttcaatagcccgatatgtacatcggcgacttttaataatcttcgtacactcagcatcgcattgaagatggacgagaaaaacaaaattgcaatgtacgcccgcataccggcaaaccgcatgaaaagcaaaatcaaaagcacacgcagaaacgaatccgaaaagttgtatttcatggagttcagctgctcgtcaagcccctttaaaagactgtccactacgacatccagatacaaaagcggtacgagcggcgccaaaattttgaggtatgccccggcttcccggctcttataaaacgcctcgccccagtcactgccgaaaacaaagaagatccccgcgcagaaaatgccgaactgcagggccgcgtgcaccgcgcgctgcgtgatgtgccgcacggccctgcggtgcgaaagctcaaattcccgcgccgttttcgggatgagcaaggacgcgaacgacgtcaaaaacgaagacggaaagtacagcatcggcattgccatgccctgcaataaaccgtaggcggacatggaagccgcacgactgagcccgtaacgcccgagctcgcgcgggatgagcagattttccgccgttgaaagcaagctgcgcgccgcgcttgaaagcgtgcacggcaccgcaatgtggaacatcccgtgcagaacacccgtcgcctgctctttttctttcggcgtgttgcgctttaagctgcggcggtaaatgaggaatcccgccaaaaacgaaacggcttctccgaatgttgaagcaatcatcgccgcaaagcacgcggcttctatgctctgcggcgcaaaataccagaacagcacaacggcggagaaaatcgtcagcacctgttccaccgcgtcactccatgaggtggaaagcgattcgtccactgctaaataatatcccttcatgcacgtgcactgcgacataaacggcagcccaagcgccaaaatgcgcagagacggcgccgcgccggcgttgcccaaaatatgcgcggcggcaaaatccgaaaagcacagcagcaaaaccgcaatggtacagctcaccgtcaggcagaacaaaaagcactgcgtcaccacgctgcgcaccgtgcagcggcggttcgccgcaatggctgccgtcaccatgcgcgtcacggccaagctgatgccggaagtggaaagcgtgatggcgagcaggaacacggagaagatgagctggtaaagccccatgccctccgcaccgattttgcccgataaatacgcacggtagccgatgttcgtaatgcggaaaaacagtgaaaatgccgttaaagcgatgccttgcagcagaaatttgcgttttgtcatgattgtcgcagggcctcctattgcaagttttccgggcgcgttgtataatcagcttatatgagaaatgtatagataattttctgcattttataaaaagagaacaggagttaaaaagtatgacagatcaggtaaacgcagactggaccgaattacaggtcaccattcccgcggcggatacggactgcgcgggcgacattgcgcagatggtcgtgccctacggcatttatattgaagactattcgcatttagaagaggaagcgatggaaatcgcgcatatcgacctcattgacgaagaccttctcaaaaaagaccgcaccaaaagcatcatccatgtgtatatcagcccggaggaaaatccggcggaagccatttctttcctcaaagagcgttttgaagccgtcggcattgagaacaccatcaccgccgccaactgcgcggaggaggattggatcaacaactggaaaaagtattttaagcccatccccgtcggcaaccgcttgcttgtgcgccctatgtgggaggacgagtacgaagcaggtgaccgcgtcgtgctgcatctggagccgggcctcgcgttcggtaccggcacgcatgaaacgacccgcctttgcatggagctgctcgaaaagtatgtaaagccgggcgataccatgcttgatatgggctgcggcagcggtattttgtccgtcgccggtctgctgctcggcgcaggcagcgccgttggcgtcgatattgatgccctcgccgtcaagaccgccgtcgcaaacgcagagatcaaccacgtcggcgataagttcaccggcatctgcggcaatctggcggataaggttaccggcacattcgatgtcgttgtcgcgaatatcgtcgcagacgtcgtgattttgctcacaaaagatgccccgcgcttcatgaaacccgataccgtctatatcatgagcggcatcatcgatacaagggaagacgatgttttggcgtgcctcgcggataaattcgagatcatcgaccgcaaagaggaaaaaggctgggtcgcacttgcagcaaagctaaagtaaacatagcgaagcgacaaacaaagtctttggtcaagttttcttcagaaaacttgcgggttatcagggcagagccctgattcgtcgtccgcagacgatgaaattcttttgcctacattaggactaggaaggtaggctaaacagtccggtggacggtttagccgcaggaaacccagtcaatggggtttctgaacgactcgtagaaacgagtcgttagaaaatataaataagcactaaaaagattcggagggattatcatgacagcagaattccacaaggcaaaccgtcagcgcctgtacgccgaaatgaaagacggcagcgcagccgtgttcttttccggcagcgcgccgcgccagagtgctgatgcgtactatacattcttcacaaaccgcaatttcctgtatttaacgggcattaaattcgcggggctcgtgttggtcgccacaaaaatcggcggcaatgtgcaggaatccatctatatcctcccgccggatctcatgaaagagcgctggacaggccgcagaccgaaagccgatgaagttatggcgcagtccggaatcacggatatccgcttcgttgagaactttgaaaacgatatccaccgtgttttgaacagcggcaacgtgcagcgcgtctacctcgacctctaccgccatacgccggacgagggcttagatgaagcccaccgcttcgcgcagaccattaagaccggctacccgttcctcacggttgaaaatatcctgcccatcttaaagcgcctgcgtaccctgaaggctccgtgcgagattgacgccatgcgtcgtgccatgaccgttacgcgcgaaggcattctgcgcatgatgcgcgcttcgcaccccggcatgtatgagtacgagtataaagccgagttcgactacgccctcaccagcgccggcgtgcttgagcccgcgttccactccatcatttctgccggcgaaaacaacttctgcatccattacgacagctacatgggacaagccaaagacggcgatatgatcttgaatgacgttggcgcgcagtgggacggcgagtgcaacgatgtctcccgtggctggccgtgcaacggcaaatactcgaaagagcagcgcatgctgtatgagtgtgccctcaatacgtcgaactacatgttctccatcatcaagcccggtatgctcatggacgatgtggataagaccgcccgccgctattgctgtgagcagctgaaaaagatcggtctgctgtcctcttacgatgagattggcaaatacatgtggcacggcggtgcgcaccacgtcggctacgacgtgcacgatgttgtcgatgcactcggtaagcctatcgcgccgaacatggtcttctgcgttgatatcggcatttacgccgaagagctcggcatcggcttccgcgtggaggataactgccttgtcacgccgaccggcgcagagaatctctccgcgtccgtgccgcgcaccatcgaagacatcgaggccgtcatggcaaaataacgggagaaattgcaatgaagctcattttacccgagcagattacggaagcgcagtataaagcgtatcttgcggattggggtgcagagcgcatcgtgccgagcgagcgccacaagggctacgccaaaatgcagcttgcgctcgcgttgcctatcacacatgtcgtgggtagaaggcgctcatcacctgcgcagacaattttgaaagaaagaagtgaaaaacatgacaaattttagcaagctcgttttgaaaatgacagagtacgagggcggctgtgtcgagcgtgtcaaccactttttgaaggtgttcgcgttcgcaaagaccatcgcggagggcgaagacgtggacgatgcgacaaaagaaattttggaagccgccgccattacgcacgacatcggcatccgtgtgtgctttgaaaaatacggcaactgcaacggccctcaccaggaggtggaaggcccgcccatcgcactcgaaatgctgcccgcgtgcggttatacccatgggcagacggagcgcatctgctatctcatcggccaccaccacacgtacacgaacatcaacggcatcgattatcagattttggttgaagccgatttcctcgtaaacattttcgagagcggcatgacccatgaagccgccgaaaaggtgtacgagaacatcttccgcacaaagaccggcaagcagcttttaaaagacctgttcttgtaaattgcacataaaatcaaaaattagaatattgacatttatgagaaataaccttacaattaacattgcaaggttattttttacttgttaaatttttaaggagttgtgatatatggcaagaaatttcatgtgcaccaaaacagacccggtcgtcgagaccaaagccggtaagctgcgcggttttcagcttgacggcacatatgcgttccacggcgtaaaatacgccgatgcaaagcgtttccaccagccgaccccggtagagccgtgggagggcatcaaaaacgcgctggcttacggctacgtgtgccccatgctgcagcaggatcagcccagcaacgagctgatggtgccgcaccgctattggccgctcgatgagaactgccagtacctcaatatctggacgcagcatcttgacccgaacgccaaaaagcccgtgctcgtttggctgcacggcggcggattcgcggcgggctcctccattgagcacatcgcctacgagggcgaaaacatgagcaaatacggcgatgtcgtcgtcatttcactcaaccaccgtcttaatatcctcggctatctcgacctttccccgttcggcgaggaatataagaattccggcaacgccggcaacgccgatatggtcgcagctttgcagtggattcacgaaaatatcgcaaacttcggcggcgacccggaaaacgtcacgctgttcggccagtccggcggcggtatgaaggtctggacgttgatgcagacccctgcggcggacggcctgttccataagggcgtcgtgcagagcggctgcatcgatcatttcgtctccggcaattccacggagcagaacggcaaagccatcgtcacggcgcttctggcagaattgaagctcgataatgtcaaagcactggagaccatcccgtacgcacagctcgcggcggcgtacaacaaggtcgcgccggaggtcgcaaaaacgggcgcatacgtcggcggcaacccgctcgcaaacgattggtacctcggcgatccgctcgaggtcggtttcacggagcacgcaaagaccatcccggtcatggttggcaccgtgctcggcgagttctcgttcatgccggcattaagcgaagaggaaaaggccgatgctgcactcatcgattctatgatcgaaaaacgctacggcgcagagggcaaaaagctcaaggagatgttcgccgaggtttacccggataaggacgtcagcgacgtgctgttcatggattccatcttccgtgcgccgtctaccgatttcatcttgaaaaaagcacagcacccggaaagcggcacgtattcgtatatgatgacctacaccttcccgtatgacggtgggcatatcgcatggcattgcagcgagatcccgtttgtgttccataacacgagcctcgtcgccgcgtataacgagcccggcgtgaccgacttgctcgaaaagcaaatgtgcgacgcgtggctcaacttcgcgcgtgacggcaaaccgtccagcgaagatttgccggagtggccggcttgcactgcagacgacgaagcgaccatgattttcgacaaaaagtgtgaagtcagacataactacgaccacgagcttgttgcgctgcataaaaaactggccccctcgccgtggagccataacgatgacgaggaagagcagcagatccagcactaagcgcttcgcatttgcccgtgaaagcgaacgaataaaggctttgatttagattttcttcgagaaaacttgaggggacttggggcactgccccaagtcccctcaagcttttgaaaaagcttgagcaaaacttttacgtcgctacgctatgttccccgcaagcttctttttttgcgcaacaaaaaagccgaacacaacttctgtgctcggctcattttgcattaaattacaggttagccttcagccatgcaatgtcttcagcaaggcaagctacgcgatcctgcgggtcgttgtagctggcttcacgctcaacaacgtaaatgacgttgtcgcactgtgcgtcggcagctgccttaacagccttccagtccacaatgccctggccctgcggcacgttcagcttgtcgtgctcttccttcatcttgaggaactccggcgggaagatcggcttgccgtcagcgtctttctcaaacttgaagcgcggggtggtgtcgtggcgggactgcggcttgtttgcgccgataacgccgccgttttccttaatgtggatgcttgcaatgcggcctgcgtggctgttgatgaagtctaccgggtttacgcctgctgcgctgcaccagccgcagtcaagctggaaagccgtaacttccgggtcacatgcatcgatgagccagtcataaagatacttgccctcgtccacatagaactcgtcggtgtggttgtggtagccgatcttgatgccgtactgcttcgcaatgttgccgaggcggttgagctctgctgcaacttcttcagcttctgccttgttgcagaaatttgtcatcgggcagatgacgagctttgcgcccagctctgcaaagtaggggagaacgccttcaatctgatccagaccgacgtgcgcggaatcgaccttcaaattgttctctgcaagaaccttcttcatttcttcaaccggcacttccgtgaagtctgcggtgaattctgcgcctgcgaagcccaactttgcaatggtctgcagcttttcaatcgggctgagcggctcggaaatcagggaataaacctgaacattgatattttccatgggaaaaaccacctttctgaaaattataacgtttgcggaaactccgccttaaaaaatgtgcggcgacacgaaatgccgccgcacacaaaatgtactgattaaaattagtcgaagtaaacaggcttgccggttctgttggactcatagatcgcatcgaggattctcgtgacgacataagcctgatcagccgtaacaaacagctcgccttcgcccttcagagccttgacccagatctcagcttccttggacttcggtgccggaccctgagagaagcccgggatgaaacctctgaccttgttgccaacccaagaaatggtcgggtactcagcaacaacatggttcagacggacacggccttccttcgtatcgaggccgccctcggtaccagccagcatcgtgtaagcttcgccgtttgcagcgtagtcttcagccatgttgatagcccaagcagcgcgcagaacgattgtagcaccgttcttcatcttgatgaagccaacagcggagtcttcaacgtcgtaggtctcgttgttccaggtatcgaactcaccgcggtagttgacctgaccctgatgcttagcatcgagcgtgtggccgagcttctcgaaagaagtgccgcaaacatagtcaacatcgtagttgttcatgaggaacagcgtgaggtcaagagcatgcgtaccgatgtcgatcagcggaccgccgccctgctttgccttatccgtgaatacgccccaagtcggaacgccacggcggcggaggtatgtagcctctgcatagtaaacatcgccaagagcgccggaatcgacaaccttcttagcaacctgattctccgggaagtgacgatactgatagccgatcgtcagcatcttgccggttctgtctcttgcttcaagcatcttcttagcgtcagccggggtagcagccatcggcttctcgcacagaacgtgcttgccagcctcaagagcagcaacggtgatctcgcagtgtgcaacgttcggggtcagaacgtgaacagcgtcgatcgtcgggtctgccagaagctcatgataatcggtgtaaaccttagcgtccggggtgccgtactctttagcggccttttctgctctctcaagaatgaggtcgcagaatgcgcacatatctacgccttcctgctgggccatgcccgggaagtgcttgccgtttgcgataccgccgcagccgataaagccaactcttacatttgccattggaattctcctcctaaatttacgccgaagtccatacggactcctaacgatttatttctgcttgtattttagaccattccaaagcaaatgtaaagccctttttgtgaaaaaagcggatttgcacaagcttttttaatgctgcttgtatcatttgcacaaaaacttttgctttgttgcctgcgcgtcccaaaatcagccgtgcatttcataaaaaagagcaaaaaaagaggcacaccgcaaaaaatacggtgtaccctaaagtattcttacaacattctgcttataaaaacacagttaaaaccgtgtaaaacacgtatgccgatttgatatagcgctacgcaaagcagaaaaatcagtactgtctgccccagtagaccatgtgctttgccggcttgccgcagcaaacgcaaacatcagagaggtgctcttccttaaacggaatgcaacgggacttcacgccaccggtcgcgtccttcagcttgtcctcgcacgcgctgtcgccgcaccacatggccttgatgaagccgggcttgttctccgcaatgtcgaggaactcctcatatgtcgtcgccgtgaaggtcttctcttcaaggttcttcagcgcacgctcataaagaccgtcatgcacagcctgcaaggccttttcaatctcgccctcaaggttatcgagcgaaacgaaaatcttctctctcgtgtcgcggcggacgagcacgcactggttctgctcaatgtccttcggaccgatctccaaacgcagcggcacgccctgcatctcatactggctgaacttccagccgggggagttgtcggtgtcgtccagcttcacgcggaacttcgtcttcagggattcatacagcgcgcttgccttgtcgagcacgccgggcttatgctgtgcaatcgggatgattgccagctggatcggcgcgaccttcggcggcagtacaagaccgttgtcgtcgccgtgtaccatgatgatggcaccgatcatgcgggtggaaacgccccaggaggtctggtgcgggtgctgcagggtattgtcgcggcccgtgaacgtaatgccgaagttctttgcccagccgtcgccgaagtagtggctcgtgccgccctgcaaagcaacgccgttgtgcatcatcggctcaatggtgtaggttgccacagcgcccgcaaacttttctttctcggtcttctggccggtcacagccggaatggcgagcacgttcttgtagaactcctcgtaggtgtgcagcatacgcatggtctcttccatggcctcttctgcggtttcgtgcatggtgtggccttcctgccacaggaactcggaggagcgcaggaacggacgcgtcgttttctcccagcgcacaacggagcaccactggttgtagagcttcggcaggtcgcggtaagagttgatgatcttctggtaatgctcgcagaagagaatctcactcgtcgggcgtacgcacaggcgctcactcagcttctcgctgccgccttccgttacccaggccacttcaggcgcaaagccctttacgtggtctttttccttctgcaggagggattccgggatgaacagcggcatgtaaacgttctggtgacccgtcgccttaaagcgatcgtccagttcatgctgaatgttttcccagatcgcgtagccgtacggctcgatgatcatgcagccttttacgctggagtaatccatcagctcggcttttttaacaatatcggtgtaccatttggaaaagtcaacgtccatggaagtgatgtcgttgaccatcttcttctgattcgccaagaaattcagtcctttcacgattcgtgcggcaaacgctgtgccgccgggcccaaagcgggcatatcttttcttattatacagggaattttcctgaaaagcaagagcggcagccatctttgtgcgggccgcctaagattttatttaaaaaaacagaaaagaaggttcgtttcttctttccttgtacgattcggtgcaattttaccaaagatacttatacataaataattaaaagttaacttaaactaatttacagaaacagagtaccaacaaaacagctgtccatcggaataaattaaatcagcgaaaaaaaacaccgggaacagccagaaagccgttcccggtgttttcatatcgttttgcacaaggcgaaaaatttcacgcagagcgcaaaaattactgaccctgatgttcttcgatgaactgaacgatttcgccaaccgtcttgaggttttcaacttccgtatccggaatttctacgttgaaagcgtcttcgatggacatgacaagatcaacaacagcaagggaatctgcgtccagatcctcaaccaggttggaatcctcggtgatctcggagggatctacgctgagctcctcagcaataatatcgataactttctccagaaccatttaattttcctcctatcgtgtagtatttgtcaagtactgcaccgtctgccgtatggacaaaacgccgcaggcatgatacaatcggggtgtacttcacatacattgtatggatgcacggcttatttgtcaatagcaattccgcattccgtgctaaatttttctgtttttaaaggagagccttaaaatgccgcttcgccgttttgccgtcatcgggcaccccatcgggcacacgatgtcgccgtttatccatgatcgcctcttctccctcacaggccataagccggaatattccgtgctggatgtaccgtcccttacacaggcgctgcccgcattgcgcacgctcgacggcttcaatatcaccattccccacaaaagcgacatcattcccctgctcgacagtatcgacgaaaaagcgaagcttttcggatccgtcaacaccgtgcgtgtcgaagacggcaaaatgaccggctacacaacggacggtgtcggctgcaaaaaggcccttgcgcgctatgggctcgattttaacggcgagctccttctgctcggccgcggcggcgcggcgcgtgccatcgcatttgaagccgtgctcacggccgatgcaccgcatcttgatatcgtctgccgcgaaagctcgctcgaaaaagcacaggtgctcagcgatgaactcgcggagctctgccgcacgcgcagcaaaaccggcgtgtttcgcgtgctgtcttatgacgagctcgccaaggaaaccgggcactacgatctcgtgctcaacaccacaagcctcggtatgtaccccaaaaccggtgtcagtgctgtcggggaagacgtgctctcccgctgcaaagccgcgttcgacgccgtctataaccccggcaaaacggaatttttaaagcttgccgcaagctgcggactcaaaactgtcggcggcatgggcatgctcgtctgtcaggcggtcgccgcgcacgaactctggtacggcgcgtcgtttaaggacagcgatatcgaacagctcatctgcgatgcggaagcggaaacggcacggcttttccgcgcataacgaaccgaaagaaacggggaacgggaaatggacaaaaaagtaaaaggtgaaatcataaaatcgggcaatatcgttttaagcggcttcatgggcagcggcaagaccacggtcggccgtcgcttggccgccgcgctcgatatgcagtttgtcgatatggacttgtacatagaaaagaagaccggcatgacggtcaaggagattttcgcagaatacggcgagctgcattttcgcgcgctcgagaccgagaccgtaaaggagcttgcgcaaagtaatcatttcgtcattgccacgggcggcggcacgctgatgcagccgcagaacgtagagggcttccatcaaggcggcggtaccatctattatctcgacgtaccgctggccgccttgcaggagcgcctcaaaaacgataaacgccgcccgcttctgcagacgccggaccgccgcgcggtgattgagcgccttttaaacgagcgccgcccgaaatacctcgcaagcgcggacgtcgtcgtcgacgccggcgcgcccacggttgtcgttgtagagcgcatttgcgccctgcgcggcgagcccattgaaaaagcgaagcgcaaaaagccgggaaatacctccgaaaaggagcagcctcaaaagaagcgcttccgcagaagaagacgcaaaaaaggaacttctcccggaacaccgcaagaaaactcttgacaaagcgcccgcgcggcggtatgattttaacacggcgatgcaggatagataaagcaaacctgcaaatcgcaaagcaagagtcacatataggatggttcaaactatgcagtccgttttattcacaagacgatttacaaagtattttagcgcacgattttataccgtgtgcttttcgtcgtatgtgaatataccgggcaacgcttgaaaacgcgcggaaaatttctgcgcggaggaatttgaagtattctgagcagtataaaaccaagcggagccaatgggcttcgctttttttgtgccgagagcggcagcggggcacggctcctataaaagaaaggtaagggaaaaaacatgatcatcgtactcaaagccaaccgcagtgaagaacaggtcaaaaacttcatttcgaatctcaccgaccgttatgacgtcagtgttaacacatgggtcggcacacattccaccgtgctcggccttatcggcgataccgctgcggtagacagcgagtacatcgccgcacaggatattgtagaaagcgttaagcgcgtgcaggagccgtataaaaaagcaaaccgtaagttccatccggaagatacggtcatcaagcttcctaccggtcaggtgatcggcgacggttcccttgcgctcatcgcgggtccgtgctccgtcgaaagcgaagcgcagatctgctgtgtcgcagagcgcgtcaaggccgcaggcgctacgttcctgcgcggcggcgcattcaagccccgtacctcgccgtatgcgttccagggccttaaggcagagggcctcgagcttctcaaaaaagccaaggaaagaaccggcctgcccatcgtcaccgagattatgagcatcggccacctcgacctctttgaggacgtcgatgtcattcaggtcggcgcaagaaatatgcagaacttcgagcttttaaaggagctgggtcacgtgcataagccgatccttttaaagcgcggccttgccaacaccatcgaagaacttctcatgagtgccgagtatatcatggcgggcggcaacgagcaggtcatcctgtgcgagcgcggcatccgcacgtatgagacattcacccgcaatacgctcgatatttccgccgtgccgatcttaaagcgcctttcccacctgcccgtcatcgtagaccccagccacgccagcggcatcaactggcttgtcgagccgcttgccatggcggcggcagccgtcggcgcagacggcctcatcatcgaggtgcataatgaccccagccgcgccctgtgcgacggcgcacagtccctcacgccggatcagttcgacgtgctcgcaaagaaagtgcagaaggtcaccgaaacggtgaagagcctgtaaaaatttacccgaaagggagaacgatatgcaaatcgcaatcattggtctgggtctcatcggcggttcgctcgcaaaggccctcaaagaaaatacagagcacaccgtcatcggctttgaccgtgacgaaaacaccctgctcgacgcactttccctcggcgccatcgattccgtcggcagcacgtctttgctcgaaaacgcggacgtcgtgtacgtctgtctgtatcccgcagatgtcgtgcgcttcgtcgaggaaaacgcaccgcattttaaagaaggctgcattgtcacggatgtgtgcggcatcaaaaatcaggtctgcggcaaattaacggagatcgccaaaaactacccgttcgtttacgtcggcggccaccccatggcgggcaaggagcgcagcgggttcgatgccagtgaggcaagcctcttttataacgcttcctatattctcgtgcccggcgaagctccgcaaagtgccacagatacccttgtatcgctcgcaaaaagcatgggctttggcaccatcaaatactgcacgcagcaaaagcacgaccgtatgatcgcctatacgtcccagattccgcacgttttggcgtgcgcttatgtcatgagcccgcgctgcgatgagcacagcggcttttccgccggcagttaccgtgatgtttcgcgcgtggcgcgcatcaatgcggagctgtgggcagaccttttccttgcaaaccgtgaggaattagcggacgagacggaagaactcgtgcgcaatatagaacgtatacgcgctgcggtagcgaaaaacgatcgggcagagcttgtggcgctgctttcctccgcacgtgaaaaaaaggagaaattcggataatggtgatcgaaattaaaacagataaaccgtatgaagttattgtggaagacggcgttttggaccgcgcgggcgaaaaaatcgccccgctcgtccgccccggcagccgcgccatgattgtcagcgagacaaacgtcttcccgatatacggcgagcgtctaaaagcttcgcttgaaaaagcgggtatccacacggcggagttcgtctttgaagccggcgagccgcaaaagcagctttccaccgtcatgcagatttacgaagcacttgcggaaaacgatttcacgcgcagcgacatcattgtcacgctcggcggcggcgtagcgggcgatatgggtggcttcgcggcggcaacgtttctgcgcggcattgatttcgtgcaggtgcccacgtcccttttggcgcaggtagatgccagtgtcggcggcaaaacgggtgtcgatttgccgttcggtaaaaacctcgtcggcgcgttccatcagccgcgcctcgtcctcgccgatcccaaaacgctctccacgctgcccgatgcctatttcacggacggcatgggcgaggtcatcaaatacggctgcatcgcagacgccgcactgtttgataaattggagcagggacaagtcatcgaccatttggaggaaaccatctgccgctgcgtgctgtgcaaaaagcactttgtcgaggaagacacgaacgacaaaggccggcgtatgattttaaacttcggccacacattcggccacgcgctcgaaaagcttacgggcttctcgtcgctttcgcatggccttgccgtcggcatcggtatggttatggcgggcgaagtgggtgaaagtctcggcgtcacggaaaaaggcaccgctgcgcgtatccgccgcgtgctggaaagctacggcatgcccaccgagtccgcgtttgatttcgccaaagttgtggaagcaaccgcgctcgataaaaaaagctttggcaaaacgctcaacctgatcctcttaaaacagatcggcgaaagcgttattcacccggtggacagaaactacctcgtactgcgctataaactcgccgccgagcagaaccgccgcagaaaattgaattgatttttaggaaggcagcatcattctcatcgtgctgccttatgtcaaatatagagagataaatttatgtagaaacaaggtgatactatggcagaggtgacctaccgccccgcccacgttaagggcgaagtgcgcattcccccaagcaaaagtgccgcgcaccgcgcattgctttcggcggcgctgtgcaaaacgccgtgccgtgtcgggcccattgaccacagcgcggatatggaagctacattaaacggcgtgtgcgccatgggcggcacggtgaaagcggaagaaaacggcgtgctgtgcatcgcgccgggcacggcaccccaaagcgtcacggtcgattgcggtgaatccggttccacgctgcgttttctcatccccgttttcgccgccctcggcatcgaagcgacgtttgtcggtcacggcagacttcccgagcgccctatcggcgtttacacagaccttctgccgcagcacggcgtaacggtcgagactgccggcggtctgccgtttcacatcacgggcaagcttcaaagcggcgatttccgcgtgccgggcaacatcagttctcagtttataaccggtttattattcgctttgccgctgctcaaaaatgattccaccgtcacgctgaccaccccgctcgaatccaaaggctatatcgatttgacgatagaggtgctcgcgggcttcggtgttaaaattgaggagaccgagaccggctggcacatccccggcgggcagacgtatcgcgcagagcactataccgtcgagggtgattggtcgcaggccgcgttttttctctcggaagccgctgtctccggcggccctatccgcctgctcggcctttccgaaacctctctgcaaggcgataaagcctgcgtccgtctctggcggcagttcgggctttctgtcaccgaagaaaacggcgtttatgttgccgaaaacaaaaatacagataagccctaccgcggcctgcacggcatcgcgattaacgccgcgcaaattcccgatatggtgcctgcgctcgccgtcacggccgcgttcgcggagggcgagaccgtcatttcccacgcggagcgattgcacttaaaggagtgtgaccgtctgcttgccatggaagcggcgctcaaaaacctcggtgcagacattaaagccgtgccggacggccttatcattcacggcaagcccgcgcttacgggcggcaaagccgagggcatgaacgaccaccgcgtcgtcatggcgctcgccgccgccggttgtgcgtgcacagtcaccgtcacggacgcggaaagcatcaaaaaatcctaccccggatttttccgggatcataaacatttaggagggatcgccgatggcatcgacctggggtgaaaacatcaagctgtccattttcggcggcagccatacggaagcgatcggcgttgtgctcgataatctcccgccgaacgaaaaaatagacatgggaaaaattcgcgtgcagatggcgcgccgtgcaccgggcaaggacaagaccgccaccacgcgccttgaggccgatgagccgcaggtgctctcgggcctcttcaacggcgtcacaacaggcgcgccgcttgcggctatcatcgcgaacaccaatacgcgttcgaaggattattccgatttaaaaattcacccgcgtcccggccatgccgattacaccgcgtctgtccgctacgacggcgcaaacgacattcgcggcggcgggcatttttcgggtcgtctcaccgcatgcctcgtgttcgcaggcgccgtctgccgccagatattagagcgccgcggcatcacgatcggcgcgcacgcttatgcggtcggcagcgcaaaagataccccgttcgatcccgtaaacgtctcaaaagaagacttaaacgccttaaatacccgcttttttgcggtcaattcctccaaggccgaagaaaaaatgcgcgccgagatcgaagccgcgcgattggacgcagacagcatcggcggtatcatcgagtgcgccgcagtcggtgttccggcaggcatcggcagtcctatgttcggcggcatcgaaaacgtctttgcatcgattttatacggcattcccgccgtcaaaggcgtggagttcggcgcgggctttgatgttgcctgtatgcgtggcagcgaaaataacgacgcgttttactacgacgaaaatggtctcgtccgcacgaaaacgaacaacgcgggcggcattttgggtggcatcacaacgggcatgccgattctattccgtatcgccgtcaagcccacgccgtccatcggccgtgaacagcacacggtcgatctcaccacgaaaacaaacgccgatttaaccatctacggccgccacgacccgtgtatcgtcccgcgtgccatccccgtggcggaagctgcggcagccttggcgctgatggacttgctgcgttaaagagaatagaaaggagcgagcacaatgagtgaaaataagtcctttgatgaactgcttttgccggtccgcaacgatatagaccgcattgataaagagcttttaaagcttttcacggagcgcatgcagtgcgcggagcgcgtcgcggagatcaagcgcaaggcgggcattcccgtcttaaatgccgcccgcgagcaggtcattttagaccgcgttaaaaaagaagccggtgagtacggcgacagcgccgtcgcgctttacagcgccatcatgagcatcagtcgcgcccgccagcacaatatgctgaaaagcggcgggatattgcgcgacctcgagcaaaattccccaaagacattaaaagctgacccgcgtgtcatttgtcagggcgcggcgggcgcgttttcccacagcgccgccctgcgcctgttcccggggcagaagccgatctttttgcccggcttccgcgatgtttttgaagctgtccgcaacggcgcgggcgattacggcgtggtgccggtcgaaaattccgatgccggcagtgtctctgaggtctatgacctcatcatgaagcaccgcatgttcatcgtcggtgcggcggacatccccgtgcgccactgcctgtgccgcgcaaaggggacgggtgcggtcaaaaaggtgctctcgaagcacgaggccctcgtgcagtgcagtgcgtatctcgcggcacacgtcatcgaaaccgaagcctattccaacacggcagccgccgcaaagttcatcgccgaaacccgtcccgagggcgtcggcgcaatctgctccgcgcaggcggcggaggaatacggcctcgaagtcatcgccgccgatatccagaataccgataacaactgcacgcgcttcatcgtcatttcgcgtgaagccgttttgcccgaagacgcggaaaagatcagcctgtgcttctctctgccgcacaccccgggctcgctgtgccatacgctggagcgtttcgctctgctcggcctgaacctcacgaaaatcgaatcccgccccatcccggagcgcaatttcgagtatgacttctacctcgatttcaccgggaatgttcacaatgtgcagacacttgcgctcatctgcgccctctccgacgagatgccccgcttctcgttcctcggaaactacaaagaaagctgagttaaaaatggcagttacctttatcaaagtcacggaagaagaacagattgaaaaaatagccgagatcgccgcgcccatctggcacgagacctacgacggaatcaacggcgttgcgtccacagattacatgatcgaaaaattccagtccgtcccggccatccaccgccagatggaaagcgagggctacgtctattatatgatgctcgacgacggcgtgcccgcgggcttcatcggccttgtgccgcacaaagagggcaaaatgttcctgagcaagctctacgtttccgccactcatcgcagccgcggcctgccgcgcgccgcgttcgatttcatcgaaacgctctgtcaggcggaaaagctccccgcaatctatctcaccgtcaacaaaaagaattttcacgctatcgaagtctacaaatacttcggttttcatcaaacggacgccgtcgtcaccgacatcggcagcggcttcgtgatgaacgactacatcatgcagaaagacctgtgatccgaaacaaaatgcaaaccgagtccgactgaaaaagcacggcttggtttgcatttttacgctttcgtgtttttgcggctgctgcggtacgctttcggcgtgcagccatagatttttttgaagcacccggtaaaatagctcgcgcccgagaatccgcagtccaacgcgatctgcgccacgggcgtttccgttttgcacaggcgctccgccgccttttgcaggcgaaaccgctgaagatattcgaccggcgtgcagtgcagatatgtgtgaaacagcttttcgcacgcgcttttgcatacatgccccgcgcccgcaatctcttccagcgtcagcttttccgcatagccgctgtgtatggcgtgcatcatgctttttacggccgaaagccggctgctttcggaaaccgtgttttcgggcttcggtgccagccagtagatctcgtcccacaccgcgtaggaaaggctttgcaggcgcagcagattgtgtttgtccgcttcgtcgaaaagcgcctcgatcagcgccaaagcgccgccgcttttttctttttccggctttaagatgcagcaggggaaagcggcgttttttgtcacgggcgtaatgtacgtctcctccaaatacgtgttggcgcatagcatcatggggtgcagcagcacgcatcggtaggtgcaacggctttcttcaaaaaaatgcagctgccgcgtgttgataaaaatcccctcgccctcgtgcaccgtgcagcgtgtgccgttcacattgtacaccatgttgccttccgttacatataataattcgatttcgtcgtgccagtggccgatggcgtcgccctcgcgcgctgcgtcgaagcacaaagtgcgtccgcccgcaaaaaagaaaagctccggcaccgtatacggcacaagctctgcgccgtcgccgtgtattctgaatttcggaatcatgctgtcctccgcattttgtcaagatatacgatatatttgtattttttaaaccgattttgctataaaacatcgttaaaatacgttatattagtattcagtatagcaaagccgatgtgcttttgcaattcttatccgaagatttaaagagaaaaacaaaaaattaaggggaatcgacatgttttctttgttgcttgcggtcatctacgccgcatttatcagtcttggtctgccggatgccctgctcggctcggcgtggccgacgatgtaccgggtcatgaatgttccggtgtcctatgcgggcattgtcagcatgattatttcctgcggcacggtcatctccagcctgatgagcgaccgcgccgtgcgcaggctcggcacgcatctcgtcacggtcatcagcgtcggcctgacggcgctgggactattcggcttttcttcggccggcgcgttctggcagttttgtgtttgggcggtgccgtacgggctcggcgcgggcagtgtagatgccgctctgaataattacatcgccctgtattaccgctccggccacatgaattggctgcattgcttctggggtctcggcgccatggccgggccgtatatcatgggtgcgtgcctcacgggcggctattccttcggcgccggctaccgcgtggtgttcttcattcagctcgcgctgacgatcgtgcttgttctctcgcgcccgctgtggaagaaaacgcccgcaggcgaggcggagaaaacaggcgggaaatcctttctgcgccgtgtgctgaaaatgaccggcgcacccgtcaccatgctcgcgttcttcttatattgcgctttggagggcaccacagggctttgggccagcagcttcctcgtcctgcggcacaatattgcggcggaaagcgccgcctccatggcttcgctgttttacatcggcatcacggcggggcgtttcctcagcggctttatctccgataagcttggcgaccgccgcatggtatcgatcggcatcgtctgcgtgctgtttggtacggttttattgttcgtgccggtcgagttctcggcggtggcgggccttgttttcatcgggctcggctgtgcgcccgtttaccctgggcttctgcatcaaacgcccgtgcgcttcggcgccgaaaacgcgcaggcggtcatgggtatgcagatggcgtgcgcctatgtcggcagcatgacgatgcccgcgttcttcggcaagctcagcgacctgctcggtatgcagatttatcccgttatcctcatggcgtttgccgcgctgctcgcctttgccgtgtggaacgcaaaccgtctgacgctcgactgcaaataacacggcgccttgacaaaaatcaaaaatcgacaatcttgcgaacggtgtacaaaaatttccttcgaccgttcgcttcttctttctttttcggaaaatctgtgctatactaaaaacaatattttaccttgagcgaggtatacgcatgagcgagagaaaagaagtctatgttttaggccaccgcaatcccgacaccgattccatttgttcggcgatcgcctacgcggacgttaaaaataaagaaaatgacggaaatcactatgtcgccgcccgcgccgggcagatcagttccgagacaagctacgtcctccagcgcttcggcatgcgccagccgacctacgtcaacaatatcggcacccgcgtgcgcgatatggagatccgcaaaattcccggcatcaacgagggcatttccatgaaaaaagcatggagcatgatggcggagatgaacgccgtcacgctgcccatcgtcgatgcaaacaacgtgttagacggcatcatcaccatcaacgacattgccacgtcctacatggaaaatcaggacagcaccatgattgcaaaagccaaaacgccgtactgcaacattttggaaacgctggaagccaaaatgctcgtcggcgaccccgatgccgttttcgagcacggcaacgtcgtcatcgccgtcgcaaacccggacgtcatggaaaactacatcgaaaaggacgacatggtcatcaccggcaaccgttacgaatcgcagctttccgccattgagtccggcgcgggctgtatcctcgtttgcctcggcgcagaggtctcccgcagcatccagaagctcgcgcgcgacaataactgcgccgtgctcactacgccgcttgatacgtataccgttgcgcaccgcatcagccaatgcatgccggttaaggcgttcatgcgtacgaaagatctcgtcacgttcaccccgagcgattacaccgatgccattaaagataccatgcagaacacccgcattcgcgatttcccggttatcgataaaaacggcaagtacgtcggcatgatttcccgccgtaacttgcttggcatccgcaagcgctccgtcatcttagtcgatcacaatgagcgcagtcaggcggttgaaaacatcgaaaacgcagaaattttggaaatcatcgatcaccaccgcatcggctccctcgagacgatggcgcccgtgtatttccgcaacgagcccgttggctgcacggcgaccatcatctattccatctataaagaaaagggcttcgaggttccgccgcagattgcgggtcttctgtgcagcgccattttgtccgatacgctcatgttccgttcgcctacctgtaccatgctggaccgcgccgcagcggaagcgctcagtgccattgcgggcatcgattgccagagcttcggtatcgaaatgtttaccgcaggcagcaacctcaaggataagactccggaagaaattttctatcaggattacaagaagttcgagttcggcgacgtcacgttcggcgtcggccagatcaacagcatgagcggctccgagctcgatgagctggagcgccgcctgcgtccgtaccttgaaaagtcctgccgcgaacatggcctctccatgatgttcttcatgctgacgaatatcatcgaggagtccacgcgcctcatgtgctacggcgagtccgccgatatgctcgttgaagatgccttcggccgtgcgccgaaagcgggcaccatctggcttaaaggtgttgtctcccgcaaaaagcagctcatccctgccttcattgatgccatcagcaaagaagccggcggcggtgtgtgatttttctcgcgtgccctctccgatttcgactatatggccgattggaccatcccgcggcacgatcgactgcgtttcgatatcataagcggcaaaataaacggataatttgtgagaaaagggtcggcccaaagcggtcggccctttttgcatacagaaaattgcgaaaaataaaaaataggactggatttttttgaaagactgtgttataatgtttgctgttgaacagaatatgggcccgtagctcagctgggagagcgctgcgttcgcaacgcagaggtcaagggttcgaatccctccgggtccaccataagtccaccgtaattttgatagaattacggtggattttttctatgcccgaaaaccgcttgaaattaggcttttcggttgtttcagcacataagtgaaccccgctgcaggcaattctgcggcggggttttgtgcgttttcggaggattgtggcttcatgtaccgtcataatcgttaaacggctgaggtaatcgttgaattagaagggaattaaaaaatcaaaacacgcacaatctctgttcgcatagtttcatttttggaggaaaaacagcataacaggttgtgctcgcatggatgtcatgctgcacctccgttatacgcggaaaatcaccgattcatacgggcgcagattggggccggtgtagccgccctcgcggtcgtaggaggagagcagcacttcgccgttctgcggaacgagcgcggcggggattttcgacggttcagcggagaaattgtggaaagaaagcagagtctcgccgttatagctgcgctttagggcgaacagcgtatcggagccggtttccgaaatttcgaggttgccgcgtgagagcgcgggactgcttttgcgcagtgcgatgagcgctttgtagcagctgaaaatggagtgcgggtcgtttttctggttttccgcgttgatctttgtgtagttcgggttgatgccgagccacggcttgcctgttgtgaagccggcgttttcggttgcgtcccactgcatcggcgtgcgggcgttgtcgcgggagatcatctgcgcctcttttaaggccacgtccggcgtgtcgcccgccaaaatgtgctggtggtaggtgttttttgcatcggggtcgttgtaatcttcaatgtgagggaagcgcatgttcgtcatgccaatctcttctccctgatacacgaacggcgtgccgggcagggagtgcagcagcatcgcgagcattttggcggaaacctcccagtattccttgtcgttgccatagagtgagacctggcggggcttatcgtggttgctgaaaaaccgcgcccaccagccgtttttctttaaggcgtcgtagtcgttttgaatatcctgcttcatttttttcggcgaccatgtgttgatctcgacgatcggcgcgacgaacgggatggctatatcgaactcctcgcggtcggtgttgacgtagcgggcgagctcctcggcgtctttcgatgccacttcgcccacggtcatgacgttatatggcgagaacacgcggcggttcatgtcgcggatataggcgtgcgtgccggggcgaccgttgatgagactcgaactgaacgaatagccgtccggctgtggcggctctgcggaatccgggaaatcctgcggcttatcaaggtagctgatggcgtccactctaaaaccgtccacgccctttttcacccaccattccatcatggagaagatttcttcacgcagcgcggggtttgcccagttaaggtcgggctgctttttggagaacaggtggtagtaatactgcccgcgctccggtacaaattcccacgcgctgccgccgaaaacggaagcccagttgttcggctccctgccgtttttcgggtcgcgccaaatgtagtagtcgcttttcgggttatcgcgcgaggttttggattcgaggaaccacggatgctcgtcggaggaatggttcacgacgaggtccataatgaccttgatgccgcgcttgtggcactctgcacacagcgcgtcccaatcttccatggtaccgaactcatccatgatctcccggtacccggagatgtcgtagccgttgtcgtcgttcggcgagcggaacacgggcgagagccacagcgcgttgatgccgagcgccgaaaggtggtcaaggcggcttaaaatgccgggaatatcgccgataccgtctccgttagaatcctgaaagctgcgcgggtagacctgatacacgatgaggtctttcacccaatcttttttctgttccatataactttacctcctgcgcaatatcgatgtatattgcgcaaagtgacctttcggccaagtattttttaccattataacacagtttacaagaatttgtgaagtatttaagaaaaatagtgaaaattgtgctttgaggtatgaagggaaaagctgggcgcttagcttccaaacatgcgttaagtttcctatactgcggtgctcgtttgccgggatgaatgcagagaagtcaatggtaaaaatgacgaaacggtttcagccgccgaaatgtacacttataagaatataggtgtatagaatggagacctataaaacagggtataagtcacaggacaaatgatataggatgttgtagggcagtatagacaactcggtttagaataaacagaaaaaacgaatattgtatcgataaagttaaagtgaatagcagattaagccgaaatacttgcaatcggaaccattaaaaaaactcatggaaccgcaatttatatactttggaatggaaaatgcgcaaaacatataggtacatgaaaattacgcattcacaaaatggggaaccgctttcatgttgttcgttaaaatgtgattttttgttgtatatggaatcaaaaaattcaaaataaacaaaagtatttggagaaaataccgaaaagtttttgaaaacttattgacaaagtgtgaatatggtgctattctatgtacagaaaaagacgagaacaaaactaaaatttagttattttttcgtttgattctgcaattttaagctatttattagcgttggtcttcggctatggagcaatagaccgatgctatcgcagagtttgaatgttctaaataccgccgctttcagcggaatgcacacatcgccgaaccggatgctaaaaaggcgagcgtgtggggaaaggtacatcagtgaacggacaagcgctgtaagataaatagggggtcatgaattttgcaaagcaaagttcatggcgggattcctataaattttgcgatttgcaggaattcaaaacaccggggatcacaaagtggggtatgctttgtgacctcaacacattatgaaccgcaggttcacaaaacaagagaggtattgtattatgaagaaaaagaccttagctgttcttctgtcggcggccatgctcgtcaccggcatcctgagcggctgcggtggcggcggcagcacaagcagtgcagcatcctccggctccaccgacagcaccagcagcaccgcgagtgagtcttctgcttccgaatcttccggctccggcacgaatgccgccgcaggtcaggttacggcagttggcacaaaccgcgacgaaacgcttgtcgttgagacccagactccgaccgacactccgggtcagttcaacagctacatgagcggtacgaccatgggctttggtattcatcagctgatgagcgcacatctttgggaaatggacaccgttgcaggtgagcagtatcctgaagttgcagccgacatgggcacgccgaacgaagactttacggaatggaccgtcaagatccgtcagggccttaagtggtccgacggcgaagacctgaacgcagatgacgttgtcttcacgttcaacatgatcaaagaaaacgataagatcggtgcttccgccgcaaccaacctctacatcgataaggttgagaaggttgacgattacaccgttaagttcacgatgaaggaatccttcccgcgctttacacagcgttacggcatcaccgtatggggcaccgattaccgcatcgttccggaacacatttactcccagcaggctgacgttacgacctataaggacgagcagccggtcgtagtaggcccgtacaccgtagaagactatgacccgaacggcgactggattctctacaagctccgtgacgactggcaggacagcaccctcggtgttgtaggcgcagaccactacggctacaccgcagaccaggttccggctaagtacgtatggttccgttaccttggcgactccgcttccagacagatgcagatggtcagcaacgaagttgacgtgctggccgaagttacgatggaagagcttgaagctatgcagggtcagaacgataagatctccgcatggtacaacgaattcccgttcgcaaccgctgacgacccgggcgcaaagggcctcgtgttctctcagggtcagggcgctccgtatgataacgccgacttccgttgggctatcacccttgcactcgatatcgaccagatctccatgaacatcttccagggcgcaggccgtgcggccccgatcccgctgatgaacaacacgaagtatctgcaggatacctacaccatcccgatgcaggattggcttgaaaacttcgagcttgacctcggcgatggcaccaccattaagccgtacgacaccggctatgcaaagcgcatggcggagaagaccggcgtaaccggcaccgacgaagagctcatcgatatgttcggcgcaggctggtggaagcacgatgcagaagcagccgaaaagctcctcatcaaggccggctttgagaagaaggatgacggctggtacttcaacggttccaagtttacactcgaactcagctacctcgctgatacagaagcacaggctggccgcggcgttcaggctgcttacaaccagctgcaggctttcggcctcgattgcaccatcgtttccaagagctccgctacttgggacgttgacggtggccagggcaacttctatcttgcaggttactggccgtccggcggtatcttgaaggacttctactccgctatcagcggttgggacagccgcctcattaagccgcttggcgagaccggttccggtcagggcgctcgttggaacgatgagactgttgataacatcctcaccgagcttgcgaacaccgacccgaccagcgacagatcctatcagctgcatcaggaattcctgaaggaagctgttaaggaaatgccggctatcaacttcacgaacggcacaaagttcgttccgaccaacagcacatactgggaaggctacccgaactccgagaacgcttataacggtccgtggtggtggtggagctgcttcaagtacatgctgccgaacattcagccggttcagggctgatttgatagcttgaatacttggagaaaatccaatagcactaatatgaaatgatctgaagaggatgagggcgtgtgccgaatacccatgaccacgtccgtcatcctctttctcatttcccaaaatatcctgttgtaatttgtctataagataaggaagtgtggctgtgaaattcaaaacattctttttacagcgtatccttgcgtgggcgttgacgatcttgatcggcgttacgttcatcttcttcatcccgcgtatgttcccttccgatcctgttgagaacatgatcgcccagatgcaatcccgttccggcaacatggatccggcagaaatggaagcgctacgtcaacaacttagaattcaattcggtctcgatggtactcttcttgagcagtatggctacttcctgctgcatggccttttgcagtttgactttggcccgtctttgatgagctatccggagccggttacctctattatcggtcgtaacctgccgtacaccctcggtttgtccctgaccaccacgctgcttgcatggatcatcggcaacttcatcggtttgcttgcaggtttccgtaagaacaagacatcctctaaaatccttgaaggcatcgcaatctgcatttatccgatcccgtacttcctggtcgctcttgttctgcagattgtcttcgcgttcgtcctcggctggttcccaatccagacaacgctgcttacccgcggcacgttcgcacagtggctcggttcgcttctgaaagcgtctgttctgccgggtatctccatgcttctgctcggcacaggctggtggattatctctatgaagtcccttgccggcacgactgcagaagaagacttcgttttatatgcacgttaccgcggcatttccgaagcgaagatcggtgcgagctacgttttccgtaactccatcctgacccagattacggctttggccatgagccttggcggcgtcttcggtggttccatcatgacagaaatcatcttcggttacccgggtgtcggtacgctgatccagaatgcgattttgcagtccgattacaacatgatcctcggatgtatcacgatttccatcgtggcgatttccacggcgacgttggttgttgaccttatatatccgttcatcgacccgagaattcgttacggttgataaggagggaagttgtaatgaaaaaatttgcaaaattttggaaagcagccaacttccgcctgaagttcggtcttatcgtgaccctgatattctttatcatcggtttcgttgtttactatgtaccgcacgtgaacccgttcacgttcaatacctacccgaataagctgggtgcttccgcagaacactggctgggcactaccagtatgggtcaggacgttgtgtggctgctgattgaagctatccacaactcgctcgtcatcggtctcatcgtggcattcctcggcacggttgtcggtgtttttgtcggtctgctttccggttttgccggtggccttttagaccgtgtgctgatgattgttacggatacgttcgttgttattccgtctctgccgatcctcatcatgatgacctccctgatgaagggcagctccaccacgatcgtgatggctcttgtgcttgccatgttcgcatgggcttggccgagccgccagattcgttccatggcgctgagcattaaagagcgcgactttatccacacggcgaagttctccggtgaaagcacggtgcagatcgttgtgaccgagattctgccgtatgcgctgacctggtcgctctccaactttatgaacgctacgctttccgctatcggttccgagtcgagccttgctgttctaggtctttcccccggcaatcttgtctccctcggcaacatgattcagtgggcaagaagctacaacgcaattttcaacaagcagtatctctggatcggcgcaccgatcgttgcaacggttattctgtttgtcggcctgttcttactcattacaggctataacgattacttatccatgaagagaggcaggtaacgaatatgttaaaagtcgaaaatctgtccacttcttacaagctcatcgacggtgacgttcacgtccttaacgacctgaactttgagatccacgataacgagatattcggcatcgccggtgaatccggctgcggcaagaccacactgctgaagaccctctacgatattatcgagttcccgctggagatcgacaaaggtaaggttattctcagcggcgaaaagaatggacaatccttttcttatgaatccggcaacattcagaaaacctggtggaacaacatttcttacgttccgcaggccgcgcagagcgttctgaacccgatcgttcgcctgaaaaagcagtttttggattctatcccgcaggaagaccgcaagaacgaaacgaaagagcagaccctcgcacgtgttgcaaaatacctcgaggagctgaatctttccccggatattttggaatcttatccgttccagctttccggcggtatgcgccagcgtgttatcatcgcgcttgcgacctttatgtccccgaatgtcgtgcttgccgacgaaccgaccaccgctctggacgttgttgtgcagaagggtattttgaagatgctgatgcgcttacagaagcaactcaagaacaccatggtcatcgtcagccacgatatgggcgtgcattatcagattacggaccgcatggcgatcatgtattccggcagcatcatcgagcttggcccgaccgatgcgatctttaatgacccgatccatccgtacacgaagatgctggttgactccctgccgcgcgttggcgataagagccagaaggtcggtattccgggtcgtccgccggcactgaagaacccgcctccgggatgccgtttcgcagcacgctgcccgcatgctacggatcgttgccgtcaggagattccggagttcattgaagttaagccgggccgctttgcagcctgccatttgctgaagaaggagggagagaagaatggctgataaattgcttgaaatcaagggcgtcagcaaaatcttccgcgtaggcggtatgattcgtggcaaaaagcttgttgcggttgacgacgttacgctttccatcgacaacgataagccggtcatcctctccgtcgttggcgaatccggttgcggcaagtccacactgtgtaagatggttctgcgtctgcacaacccggatatgggcgacatcgtgctggacggcaaatcttaccgcgataagaaaagctacaacgcaaagcagttcaagctggaagtgcagccgattttccagaacccgtatgagtctttctccgcacgtaagccggtagactcttacctgttcaacacggcgctgcgccttggcattgcgaaaaacaaagcagaagctacaaaccttgtagatgacgccctgaagagcgtcggtctctctctggcggtcgtacagggcaaataccccacccagttctccggcggcgagctgcagcgtgtttctattgcacgtgcgcttatcacccgtccgaagctgatcattgccgacgaaccggttgcggctatcgatgcttccatgaaaatgaacatcgtcaacctgttcaaggagctgaaagataagtacaaggtctcctttatctacatcacccatgacctttccacggcgtactatgtatccgattacattgcgacgctgtaccgcggctgcctcattgagtacggcccggcaaaggagatcatggacgagcctgcacacccgtacacggagcttttgatgagcgctgtgccgcgtatcggcgacaagtgggcggatgacgacatggcgttgccggatatggagtctaaggaatattccatcacctactgcaagttcgcaccgcgctgcccctatgcgacggacgaatgcagaaaatcgcgcccgggcgaaacctatctgaacgatgtcagaaaggtcatgtgcttccacccgctgattcagccgaagaagtaaagcctctgcgcacaacaaaataaacaagctacacttgccgaccccctgaaggctcatgaagccgacgtttcctccgtcattgctttatgggcatcagggggtcaattttgctttgagggcgtgttttgaaaacgttgaaaacatgtcgggattgttataaaaagcagggaaattcggcggaataaggattgaagtttgtcgcgaaatacggtatactgattcacaagcggcgctgcggggtttgcgggccgaattttagagttttggggagaaaatataatgaaaacgaagacacgctttgcgtggaaacaatttctgaaaaaccttgcaatcatcgcgatcccggtggctttgcagaacatgctgacgacaaccggcagcatgattgacaccatgatgatcgcgccgctgggcgaaacgaccgtgggcgcggtgggcctttgcgcacagttttcctcgctgatgtttgcgggctactggggctttttcggcggcggcatgctgtttttctcgcagtattggggcgcgcaggatgacgacggcatcgaccattcctacggcctgacgctgacctgcatgatgatcgtgggacttacattcggcgtctttgcgatttttgcgccggaaaccgtgatgaagctctatacggataaggagagcattcaggtaattggcgcggaatatctgcgcatcatcggattcggttaccccgtgcaggtgttttctatggcgatgagcgctctgctgcgttctacggagcgcgtgcgcatcccgctgttcgcgtcaatcgcctcggtggcatcgaatattttcctcaactgggtgttcatttacggaaagttcggcttgccggagatgggcgtgcgcggcgcggcgctggcaacggctttggcggcggttatcaacgttttggtcattttgattttggcgcgtgcgcagaagtacccgtatctgttccactttaaaaagcatttccgctggaataagaagcaggtgaaaatctacttcgtcaagtgcttccccatcatctgcaacgaagtgctcatcggcgtgggcaacatggttatcaacgttgttttgggcagacagtccgaacaggccattgcggccatcgcggtgttccgcacgctggagggcatggtcatcagcttctttgccggtttctcaaatgcggcttccgttttggtcggcacatgtgtgggatccggcgagttggacgcagcctacgagcgcgcaaaacgccttgtgttcctgtgcggcagcacgattttgtgcgtatgtctggtgctgctcggtatccacaagccgctgctttccgcgatgagtctttccggcgaatcgatggagatcggttcgcacatgctgatgatctactgcgtggcggcggtcattcgcatgtgcaactgggtgcagaacgatacgtatagagccgcgggagacgcggcgttcggcacaatccgcgaaatcgcatttatgtacgcgatggtgctgccgctggtgtgcctgacgggccttgtgtggaaagcgccgttccttatcgtgtttgcgtgctgctatatcgacgagccgatccgtctcattttgatgcagcggcacatgtattccggcaaatgggtgcgccccgttacgccgcagggcatggaagcgttgccggcgtttatggaaaagcatggacgtcataagaaggcggcgtaaacaacttaaagacagaaaaaaggacttccgaaaagaagtccttttttcgtgtgtatgaaatttagtggatgttctctttgatccacttggcatcatcggcgatgcacttgtcgtgctcgtcgtagaagccttcgcgctctacgacccagaacgcttcaaagtcctgctcgtcgagtgcgtctttgatgtcctgccagttcatgttggactccggcgcgcccatggggcactgcaccgcaaagcgctttttgccctcggggttgtttgcctgtgcgttgaagccgtccaaaatcttctggcgctcttcaagcggcatttccttgacgttggcaaacggattggcgtggcctgcctcttctgccgcgtggcgggaagccggtctcgggccggggccctgcaccttgctgttttcctttacatggatggcaacgaagcggtttttatagcggcggatgaacgaaggcggatagcagccgccgttctgtgcccagccgcagtcgagctgcgagtagcactttgtgctgttgtcaagcaggtgctcaagcaacgttttgccctcatccatgaagaattcctgactgtggttgtggtagccgatcttgatgccgtacggctctgccatttctgccatttcgtcgagcttgtgcgcgacttcgacggcttctgccttgttgcagaacggcgtgcctgcccagatgacggccttgccgccgagctcggcaatctttttgacgatctcttctgtcggctctgcgtggatggagacaacctcaaggccggtctctttcagccattttttgatatcctcaatgtcgttatcgaggtcgaccggcagcagctcgacgcccgtaaagccgagggacgcgatggtcttgaatttatcgagcagcgtgggcccgaggccgagatagctcgcgatgccgccgaaagaatatgtaccgatattgactttcatgtaaacttccccaatcgtaacaaatttgtgaaaaataaaaccatatatcaagtaaaattataccatatacacaaataagcgtcaatcaaaattacggggagagatggaaaattttcgggctattttatggcgaaattgtcgggaacaacgcaattttccggaaatttcggcgcgccgacgtttttaaaccacgctttgtagatcgggatgagcgcatctaaagtgattttttccgggcggtcgagcaggccgagtaaatttgccatgcggccgaggagctcttccggcgtaaaacgtgtgcgcagaacgccgatgtcgagatcacgctcgcgcttgcttaaacggcggccgtcgcgattgacgagcagcggaatgtgcccgtagtgcggcggtgtgtggccgagtgcgtgaaagagctgagtttggcagccggtggaagggagcaggtcacgcccgcggacgacttccgtcacgcccattaaagcatcgtctacggtgacggcgagctggtacgcgtgcacgccgtcgctgcggcgcacaatgaaatcgccgaacgtggactgaacatttatattttgcgggccgcagtatagatcttcaaacgtgacggtgtcttccggtgcgcgaaaacgcaagcttgggcggcgcgtgcggcttttttcttcggcttcggcgggcgtcagatttcggcataaaccggggtagcggaacgtgccgtcgcccgcatggggcgcggagaccgcgtgcagctccgcgcgggtgcaaaagcatgggtaaacatcgtttttggcgcggagttcacttaacgccgattcgtatagctcgcggcgcgcgctttggtagtagggggcgtgggtgcgctcgtggccggggccttcgtcccaagtgaggccgagccatgttaaatcgtccattaaaagctcggctttttcgcgtgtgcagcggtcggggtcgaggtcttcgatgcgcaggagcatctcgccgttttggctgcgcacggaaagccacgcaagaagcgcgcagcagaggttgccaaggtgcatgcgccccgaggggctgggcgcgaaccgcccgcggacaggggtagattgtgaggtggacatactaaaaatcctttcggagaaaatttgaaattataaaatcattttaccgcagattttgggtgcgcgcaacggttttgggacggagaagtgaattgacaggtgtgcgccaaacgggtaaaatgatatagcaaagttttgcacagcccgcggcaacggcggttaaaagtttcgcccgccttttcaaaggcggcggaatccaagggcagcgcccttggtcgagctccgcagagctcgaaactctttagactttagaataagaggatatcaaaatgaacgaaaaagaaatctcggaaattcgccgccgattcagggcggataaaagcaatatcacccatgtgcgcgggtgctacgtcaacgaaaagcaggaaatcgtctcgcaattcgaccagccgctctccctgctgccgcaggaggaatgcgaaaatatgctttccgtgctgcgccgtacgctttccggcacgctcggcaaaaatctcatcgaaatgccgtttacgactgcgcaggtcgttgacagcgatgagcaccggctgctgatggcgctgcgcgactcaaagcttaccgatgaagaagccgtacagatgttttttgagaaggtcatcgcatcatacagacccgagggtacgtatctcattttgctcgcgaacgatacatacgacgtgccgtaccgcgcaaaggacggcgaaacgctggaggatgcctcggagaatatctataattacgttctgtgtaccgtttgccccgtgaagcagacaaagcccgttttggggtacgacgtgccggaaaatacgttccacaaccgcgccatcgattggcttgtttccgcgccgcagctgggctttttgttcccgtcgttcaccgaccgcagcgccgatatttacagcgccatgtactactgccgcagcgcttcggaaagctacgatgaatttatagacgcggtgttcaaccgcgaagcgcccatgcccgcagaggagcagaaaacgacgtttggcacgattttgggcgatgctttaaatgacgcgtgcagtttagacgtcgtacagaccgtgcacagccgcctttgcgggatgattgaggagcacaaggcgagcaaggatccggagccgctgaccattacgggacgcacgatgaaaacgatgctgaccgcttgcggcgtgccgggcgagaaagccgaaaagtttgaggaagcctgcgcggagcagttcggcgcggacgcggcactcagcccacgcaaccttgtggagacgaagaaattcgagatcgaaacgccggaagtgcaaattcgcgtcgaccccgagtacagcgagtggatcgagacgcgctacattgacggcgcaccgtacatcctcattcccgccggcgcgggcgtgcaggtgaacggcgtgccgatcgccatcactcgcccggatgtggaatacgaggaggaagaataatggaattcaaagaactgaatatggaggttttaaaatcgattttgaacgcatccgtatgaggtaattttttgtgcccgtgcgcgacgacgagggtaaggtcatcggctacttcgagcgccacgaaatgcactgggatttcagcgaccccggtaagcctgttgcggtgccgaagctggaagcaggatattaagacaaaacaagcggcgcacagggtgtgaaaactctgtgcgccgctgattttatgtgcttttaaatttactcgaaatcagcgttcatgaagagctcgagcattttgaccgtcgcttcgatgtccttttgactcacgatggcgttcgggccgtgggtgtatcgggtgacgaccgagaagccaatcgttttgatgccgccgccgacgagcgtcatggcgcctgcgtccgtgccgccgacatagatgacgtctttctggtacgggacgttgtgttctttgcacagcgcgatggatttattcacaaggccctcgtcgctgatggaaccggtgtcggagattttgatggcgacgccgtggtcgagcgcgttgctgccctccaaatcgcccgggcggtcgtggcacggggtgacgtctaccgcgacgccgatgtccggctgaatacgctgcgccgtgacctgcccgccgcgcgtgccgacctcctcctgcacggtgaacgcaaggtagatgtcgttcttcggctttttcacgttcatcatcgccgccagcagcatatagcagccgacgcggtcgtcgatggcctttgcggtgatgtagcccggcgcaagctccgtgtacgggccctcatagcatgcaacgtcgccgacatcaacgtattttaaaacttcttccttgctgtgcagaccgatgtcgatgtagcaatcggtatagcgcttatagccgccggcgctcagcttttccggcgggatgcggcttgcgaccacgccaaccacgccgttgcggaagcggacgcggctctggtacgttgtaaacgtccagcagcagccgagctccttaaacataatgcggccgtcttcctcaattttaatgacctgaaagccgatctcatcggtgtgggcggcaagctctatgcgctttttgtgctcgcccgtgcccttaaaataggcgatgacgctgccgtttgggtcggtggtaatgtcgtcagcaagcggggctaacttttctttaatatagtctgcaacggcggtctcgtagccgctgacgccgtgcagctgggtgagttcttcaaataacttcatacgggttttcctcctctaaacggggcagaaagccgcagtccggcgttattctgccatgacggacgcaatgtctttgcagagtgcgtccacgttttcgttcgtcgtcgcccagcttgtgcaaaggcggacggcgctatgtgtttcgtccacgcgcgcccaataggaatacttgtacttttccgcgagcttttcgagcgcagtatccgggaaaatggggaactgctggttcgttggcgagggggcaaagaacgcgcagcctgcatcttcgcacgcttttgcaatgcgctttgcctgctgcacggctttttcgctgatcttgaaataaagatcgtccgtgaaaagctcgtcaaactgaataccgagcagacggcccttagccaacatgccgccgcgctgcttgatgtggtagcggaaatccgttttgagcgccgggttcgtgattacgaccgcttcgccgaacaaagcgccgaccttcgtgccgccgatgtagaagacatcggaaagcgcgcagagatccgcgagcgtcacgtcattttcgggagccgtcagaccgtagccgagacgtgcgccgtcaataaagaggtacagcccgcagcgcgtgcagacatcgtgcagggcggtcagctccgctttggaatataacccgccgttttccgtgggcagggagatgtaaacgagcttcggctgcaccatgtgctcaaacgaggcatcgttcacgtgcgccagataggcgttttccacctgttctgcggtgatcttgccgtccggggtggagggcagagacagcactttgtgacctgtcgcttccaccgcgccggtctcgtgcacgttgatgtgtccggtgtccgcactcagcgcaccctggtgcgggcgaagaatcgctgcaataacagtggcgttcgtctgcgtgccgccgacgagaaaatgcacgtccacgtcctcacgaccgcatgctttgcggatcttcgcgcgcgccaaatcgcaaatttcgtcctcgccgtagccgacagtctgcatcatattcgtttcacaaaggcgctttaaaatgttcgggtggcagccttcggtgtaatcacagttaaagtaaatcaaaatttcgcttccttccgtatcccgccgcacagagaaaatctccgccgaacggaactgaatgcaagcacagacgagtgagcttgcaaaaatacacccgtttgcgctatacgaataaatataccatgcaaaactgggtttgtaaagcatacgttatgcaaaaatcatgggctttgtttttggtgatgtatgtcgtgcgcaaaattgcccgcagagcgataacatcaggcgcaagccaaatagcacagtgaagccaaaccatacgccgcaggcgtatagcattgcggcacactttataaaggaagcgtgccgctgtgggtgcatttttacggcgaaaatgcttgacaaagcggggcggctattgtataatacaaaggctgtaaagaaaaaaactttacagcagggcgcttgaaattggaaacgcccggaaacggagcgaactatggcaaaggatctgcgcatcacgttcctgctggatttttacggcgacatgctcaccgaaaagcagcgcgaggtcgtggaatgctattataatgaagacctttctttagcggagattgcagaggagaagggcatcacgcggcagggcgtgcgcgacggcatcaagcgcgccgaacagcagcttcttgaaatggaagaacggctgggtcttgcaaagcgcttccgcagcgtgcaggaagaactgacgcagatctgcgaccacgcgttacagatcgaagcggaaaacgaaaagaacggcggcgacccggtcattcggcagaacgtggagagcattttgcgctccgcaaagaagctgacggactgagcggcgcggctctgaaaggatttttacatggcgtttgaaggtcttgccgataagctcggcaacgcgtttaaaaagttaaaaagcaaaggcaagctgacggaaagcgacgttaaggaggccatgcgcgaggtgcgtttggcgcttctcgaagccgacgtcaactacaaggtcgcaaaggactttaccgcgcgcattacggaacgcgccgtgggcgaggacgttatggaaagcctcacccccgcgcagatggtcatcaagatcgtcaacgaagagctgacggctctgatgggcggcagcgaagagcggctgaaaatgcccgcgcacccgccggctgtcatcatgatgtgcggcttgcagggcgccggtaaaacgacgcacagcgcaaagcttgcgaaaatgctgaaaagccgcggcagccgtccgttgctcgttgcgggcgatatttatcgcccggcggcaatcaagcagttacaggttgtgggcgcacaggccggcgtacccgtctttgagatgggcaccgaagacccggtgaagattgcgcaggcggctgttcgccacgcgcgcgactacggcaacgattacgtcatcatcgataccgcaggccgtctgcagatcgatgaagcgctcatgaatgagctgaaaaatataaaagaagcggtgaaccccacggacattctgctcgtggtggacgccatgaccggccaggaggccgtgaacgtcgcaaagtcgtttgatgatctgctcgacatcacgggcgtgattttaacaaagctcgacggcgatacccgcggcggtgcggcgctttccgttaaggccatcaccggcaagcccatcaagttcgccggcacgggcgaaaagattgacgacctcgaggtttttcaccccgaccgtatggcgagccgcatcttaggcatgggcgacgtgctgtccctcatcgaagacgcacaggcgaaaatggatgaaaagtccgcggcgcgcaccgcagagcgcatgatgcagaacaagatggacttcaacgacctcttggagcagttccggcaggtgaagaagatgggcccgctaaagggcatcctctcgaaattgcccggcatcaacagctcgaagctcgatgaaatggacattgacgaccgcattatggaccgcaacgcggcgatcatcctttccatgacccccgaagaacgcgcaaagccggagcttttgcaggcttcccgcaagcgccgcatcgcggcaggctgcggcatgaaggtggaagacgtcaaccgtctttgcaaccagctcaagcagatgcagaagctgatgaagcagtttggcggcaaaaagggcaagaaaatgatggcgcgtatgggcggcatgggcggtttcggcggcccggatatgggtggcatgggcggcttcccaatgtaaatgcgataaagaaacgaacttcatttatttctgacgcaagacgtatatttaaattgtaaatattgccgacgaatcgttggttaatagataaaacttattttttataatatggaggaaattaccatggttaagatcagacttcgcagaatgggtgctaagaaggctcctttctaccgcatcgttgttgcagattcccgttacccgagagacggccgtttcattgaggaaatcggctactacaacccgatggaagagccgagcgttgtaaaggttgatccggaaaaggcaaaggcttggatggaaaagggcgcacagccgactgataccgttaaggcactgttcaagaagcacggtgttatctgattgcccgtcttctcgtttgagaaaggaacaatcttatgcaggaattactgaaaatcatcgcgcagggtcttgttgaaaagccggaagaagtttccgttacactcgatgagcccaaggaagacggttccgtcgtctatcatcttcacgttgcggaagaggacatgggcagagtgatcggcaagcagggccgcattgcgaaagcgattcgcgttgttatgcgtgccgcagcaacacgcagcaacgaaaaggtcgttgttgagatcgattgatcgaaagagggacgcacgggcttcgtgcgtcctttttatattaaaagagaggaaggctttcgctgcggcagagccgaggaaaacacatgaaaaaacaatttctggaagcgggaaggatcgtgggtacgcacggtgtacgcggcgaaatgcgcgtggaaccgtggtgcgattccgccgattttctgaaaaaagtgaagaccctgtattttgacggcggcaaaacggatgccgggctcctatcttcccgcgtacacaaaagccttttgctggtgcgcttaaagggcgtggaaagcgccacacaggccgacctgtacaggggcaaaattctatatcttgaccgaaacgacgtgcgcctgccgaaaaaccgctacttcgtggaagatctcatcggccttcatgtcatcgatgacgcgacgggtgcggaatacggcacggtgcaggacgttttcgagaccggtgcgaacaacgtgtaccgcattgtaaacggcgcgggcgaggaatttctgttccccgccgtggacgccatgatcgcgaagacggacattgaaagcggaaagctgtttgtaaagcccattccgggtattttcggcgacggcgcggagaccgtgcccgtaaacgccggggaggcagcggatgcggattgatattgtgacactttttcccgaaatgtgcgagaatattttgaacgagagcatcatcggccgtgcgcgcgcacgcgggtatttgcaggtgtgctgtcaccagctgcgcgaccatggtgagggcgtacacaaacgcgtggacgactgtacgttcggcggcggaaagggcatgcttttgatggcgcagcccatagcgaaggcgtttgacgagatcatcgaacaaaccgccgtgcgcccgcatattgtgtatatgtccccccgcggacgggtcttagaccaggaaaaagtgaaggagctcgccaaaaacgagaatatcatcgtgctttgcgggcattatgagggtgtggatgagcgcgttttggaggaatacgacgtggaggaaatttccatcggcgattttgtcctgacgggcggcgagctgcccgccgtaatcctcaccgatgccgtggcgcgcatgctgcccggcgtgctttccgaagacgtatgctttgaggaagaaagccattatgacgggcttttggaatatccgcagtatacccgtccctctgcttggcgcggcagagaggtgccgcaggtgcttttaaacggccaccacgaaaaaatcaaaaaatggcggcgcgaacaatctttgaaggtcacgcagaaagcccgcccggacctctttgaaaaaactgagctgactgcggaagaaaagcgcgctttcggcagaaaataagcggattttaggaatgtttaaccctctgtggcgaactgattttacgaaatgttttcaacaagcagagcaaaatgcacaaacacggatcgtttcatagcgatatgccacgggcatatatccaaaaatggggtaccccgcttgacggggggacaaattatgctataataacttatattgaagcattttgagctttagaatcatgtttgacattcagagtatgtaatgtattacttacaggagagtgaatcgcaatgtgtgttaagaaggacgttttggttcagaatcaggttggtctccatgcaagaccggcaactttcttcatccagaaggcaaacgagtttaagtcttccatctgggttgagaaggatgagcgccgcgtaaacgcaaagagcctgctgggcgttctgtctctgggcatcgtcggcggtacgtcgatcgacatcatcgctgatggttccgatgagcaggaagctgttgacagcctcgtggctcttgttgaatccggctttgccgaataatttcagcttgtcaaaacggcgcctatcggagcatttccggtaggcgtttcttctttctcagtcgcttagtgactgagccgcatggaggtgcgcatggtacagcttacggaagaaaaaatggcgcatatcaaagagctgcgcaaaaaggcgatgaagctgccgcttcacccgggcgtgtacatcatgcacagccgcgatgataccatcatctacatcggcaaggcgaaagcgcttaaaaaccgtgtcagccagtatttcggctcggataaaaaccataatgaaaaggtgcgccgcatggtctcgaatgtcgagtatttcgagtatattctgacggacagcgagtttgaagcgctcattttggaaagcagtttaatcaagcagcaccagccgaagtacaacatcctcttaaaggacgataaggggtacagttatattaaggtgacagcgggcgactggccgcgcatttcggagacgaagcaggtcctgaatgacggcgcaaagtatatcggcccatacctttccgcgtggacgatcaaggacaccgtggaggaggcgcggaagattttccgtctgccgtcctgcacgcgcaaatttccgcaggagatcggcaggggccgcccgtgcctcaactactacatcaagcagtgctgtgccccatgccgcgggcacgtgagccaaaaggaatacaacgaggccgtgcaggaggcgctcgatttcatccgcggcggcacaagcgattccgtgcgcacgctgacggagaaaatgaacgaggcggctgaaaatctcgattttgagcttgccgcgcgcatccgcgaccgcattacggccatcaacaagctgaaagagcgccaaaaggttgtcgcaagccgcgtgccggaacaggacgtcatcgcgctcgtgctcggcggcgaaaaggtgagcattcaggtgttccgctttgcgggcggcagactgtatgaccgcgaatcgtttttgttaaacgccgacgacgagccggagcagatccgcagcgaatttgtcatgcaatattattcgatgcgcgataagatcccgcccgtcattacgatagacggccccgtcaacgacgacggcgtccttgaagaatggctgacgaaaaaggcggagcgccgcgtgaagttccacattccgcaaaagggcgaacagaagcagcttgtggaaatgtgccgcacgaacgccgcggaagcgcttgcgcaggctatgggccgcgccacgggccgtgagacctccgcgctcgatgaactgcgccagctcttaaacctgcccaaaacgccggaatatattgaatcctacgatatttcaaaccttgcgggcggcgagaacgttgcgggtatgatcgtgtttgaaaacggccgcccgctgaaaagcgcgtatcgcaagtttaaaatcaagactgtcgtcggacaggacgactacggcagcatgcgcgaggtcatccgccgccgttttgaagaataccgcgccgccgataagcccgagggcttcggcagactgcccgacctcattctgctcgacggcggcaaagggcacgtgggcgccatacgtccgcttctgcgcgaaatgggcatcgacgtgccggtatacggcatggtaaaggacgataagcaccgcacgcgcgccatcacggaggacggcggcgaaatcgccattcagtctacccgcgcggtgttcacgctggtgtcgagcattcaggacgaggtgcaccgctttgccatcggctaccaccgccagcagcgcaaaaaggcgactatctccaccacgctcacgtccattccgggcatcggcgaaacgcgcgccaaagcgctgatgaagcactttacaaccatacgcgccgtcagcgaggcgacggaggaaatgctggaggaaacgcccggtatgaacgcccctgccgcccgcgccgtctaccgttatttccacagcgaagaaaacgacggggaataacgttgttcctgcgtatttttcgacgtttctctgcaaaaactgtgcaaaaacggttgacatatttctattcaaatgagataataacttgaagtgtgtccgtacatgttttttagatttcggacacggacttccaaaagagaaaggagtgttcggctgtgcgtatcataaccggttcccgccgaggcagaaaattgaaaacgctcccgggcgatgctgtgcgtcccacgccggaccgcgtaaaagaggcgcttttcaacattttgcagtttgatctggagggccgcgtgtttctcgacctgtttgcgggctccggccagatcggtctcgaggcgctcagccgcggcgcaaagcgcgctgtgttcgtagacagcgccaaggcatcctgcggcgtcgtgctggagaacatccacaccacagggtttgaaaacgaagcgcaggtgatgaacgcggagtatgcttcgtatctgctgcgctgcaccgagaccttcgacatcgcgtttctcgacccgccgtatcgcacgggcacgctcacaaaggcgctccttgcggtcacgccgcacatgaaccgcggcggcatcgtgatctgcgagcaccccacggacgaagagctgccggagacggcgggggaattcgtgcgcgtgcgcgactaccgttacggaaaaatcttgctgaccgcgtatcgccatcaaagcatggtgtaagcgcaaaaaggcggtatatcaatgagaatagggatctgtccgggcagctttgacccggtcacgctgggacacatggacatcatctcccgtgcgtgcaaaattttcgacaaagtcatcgtcgcggtaccggtaaacccggataagcgcgcgagctttacggtggaggagcgcatggaaatgctgcgcaccgtcacggccgatatggaaaatgtagaggtagactgcgtgcgcggtcttttggcggattacgcaagcgaaaagcatgcggctgccattgtgaagggtctgcgcgcaatctccgactttgaatatgaatttcagatggcgctcaccaataaaaagctgaacccggagtttgaaacgctgttcctgccgaccagcatcgagcacatgtttctcagctccagcatggtcaagcagattgcaggcttcggcggcgatatttcccattttgtgcccgagtgccttttagagaaaataaatcagagactttgccgcacggcagactgaatgcggctgaaaatacgaaaggaatggattttttatgagcaacacgcaggcaaccgtagaagatttgattgatgaattgaccgacgtactggagaaaggctggcaccttccctttgcaggcggcaaatcgtttatagatagcgaagacgcaaagcagatccttgatgagattcgcgaggcgatcccgtccgaagtgcgcaaggcgaaggccatcgtcgcagaccgcgcccagatcatcagcgaggcacagcgcgaggccgagaccatcgtgcgcgtcgcagaggagaaggcaaaagcactcgtcaaccaggaagagatcgtgcgccaggcacaggcaaaggcaaacgacatcatggcgcagacgcaggagaagttccgcagcatgcagaaggcctccaacgactatgtggaagatctgctccgccgcacagacgacgcgatgagcgccaaccttgcagagctgagaaagacccgccagtccatccacggcacgagcgcacagcagtaatttaagagctttaaacggcagttcgcggcagctgggcgagctgccgtttttgttaaaatgagcgaacggaaacggcggtttaaagtctttagtcaagttttcttcgagaaaacttgcggattctcaagacagcgccttgagtcgctttccgcagaaagcgaaatcctgttgcgttcgcaaaaatcaggacgggcgcatcaacagtccggtggactgttgatgcgcgggagaccaatcagggggtctcccgaaaaccgggaatgtgaacaaactgcaaaagtttttttgcatgagaatgcacagaattttcaacataccgctattttgccgaaaatcggaaaatatacgaacaaaatccaagaaaaatatcggaaatccgcgctttttcatcgaacatggtaaacataaatttttttgccgcgggttgattttctatgtgggataaggtataatggacgtgcaagcagcgaaaaccctgcggaaaaccgcatgggctttggattttcattgtcttttcgccctgcttggcgctcatccgcccggcttttttcgggtaaagttcaatgaggagtgtctgccggaacgcatccgttccgccggacaaatatatcatgagtgaaattcattttgagcataaaccggtgctgttcaaagagaccatcgagtccttgaacatcgacccggaaggcacttatatagacggcaccgcgggcggcggcggccactccggcgcgattttacagcgcctgacaacgggcacgttgctttccatcgaccgcgacccggacgccattgccgttgtgaaagagcggctcggtaaatatcccggctccgtcgttgccatgggcaacttctgcgatatggacaagatcgcgttagagcacggtatcgttaatgtcgacggcgtgctgctcgatatcggcgtttcgtcctatcagctcgataccgcagagcgcggcttttcctaccacgccgacgccccgctcgatatgcgcatgagccaaagcggcacctcggccgcagaccttgtaaacacactctcttggcaggaattggccgagatcatcagccgttacggcgaagataaaagcgcggtgcgcattgcaaagggcattgtgaaagcgcgcgaagaaaaaccgattgaaactacattagaacttgcggagatcatccgcgaaagcgtgccggcagcggtgcgccgcgcggagggccatccggccagaagaacgtttcaggcgctgcgcattgcggtaaacggcgagctggacgcgctcaaaaagggccttgcggcggcgttcgggctgttaaagtccggcggcaggctttccgtcatcacgttccattcgcttgaagaccgcatcgtcaagcagcagatgaacaagtggtgcgagggttgcacctgcccgaaggatttccccgtgtgcgtgtgcggcaacaagccgaagggcaagctcatctacaaaaagggtcttgcgccgagtgaggaagagcttcgcgaaaacccgcgcgcccgcagcgcaaggctgcgcgttattgaaaaactgtgagattttgaaaaattagggtatccctgagagaatacagctgaatttgttgggataagtttccgaaaggaggaaacaacatggcatctacatcaaacgcatacgattttgatcttttcgacagcagagatcatggcagcgcggcaccgaagcttccggagccgaaagcgccccaaaaacaaaaacaaaaaaacaatgtggtgaagctggatgaaaaacagctgcgccgcagtcacagacacagtgcaaatacggtcaaaatgctcatgaatcttgcggtggtgctggtcatcgtcggcgccatcggtgcggtggtgttcagtcaggtgcagctcacggagctcaccgatgagatcaacacggcgaacgagagcctttcgcaggagaaaagcattgccattcagctcgaaatgcaggcggcctccaagcttaatacggaggagatcgagcagatcgcgcgcgaaaagctcggtatggaaaaggtagcggacgggcagacctcctacatcagcctcacgcaggatgatgagggcaccgtagtgcaggccgaaaagacaccgaacctgttggaccgtatctggcaggtcttgcagtcgctcttttcctgatttagcctttatacatacgaattttttgcggatacgctgctattttgcggcatgaaagaatacaaatgggttatgcggcccccggcagaggggaatttgagaggagagttgagagtttattcttaactctcatttttcggtatacggcaacttttggctgcgaatgaagggcgcagcagaaaggacggcattttttacatggcaaaatcaaatcgttccggcgtctggcagcgcacaatggtcatcgtgggctttgtgctggtgctcgggtttggcgccgttatcacaaaccttgtccgcctgcagcttgtcaacggcgaaaccttaaagaccgatgcggtcgaccagagcttgcaatccacgcagcttacgccctcgcgcggcaccatttatgacgccacgggcacaaaggtcttggcgcagagcgccagcgtgtggacggtcgccttggagccgaactacatcgacgaaggcgacgacgtgaagattgcaaagggcctttccgaaattttagggcttgattacgacaccgtcctgaaaaaagcgcagcagaacagctactttgtctatgtcaagcgcaaggtggagaccgaggtgcgcgatgagatcgtgcagtatatcaaggacgaaaaaatcggccgcggcatcacgttgatggaagactacaagcgctattatccctacggcaccacggcttctacggtgctcggcttcacgggcacggataaccagggccttgcgggcgttgaaacggaatacgacagtgagcttaccggcacggcgggccgccttgtcagcgcgaagaacgcacagggcgacgacatgccgttccagtatgaccaatacgtgcaggcacaggacggctacgaccttgtgctcacgatcgacgagaccgcacagagcatcgtagaaaagcacctgcaggcgggccttgaggcctgcggcgcgctggagggcggcacggctgttctgatgaatgtcaagaccggcgccattttggcgctttccacaaagggcgactacgacccgaacgacccgttcaccatttcgcaggaggccgaagacgccatcccggaaaaggtggaggacgcgctgcaaaaggcgcaggaaaaggagcagcaggagttaaacaccctgcagctcgccatcgataacgccgagaccgacgaggcgcgcgcggaagcgaaaaaagcccttgcggattacgagcgcatcgacgtcaccacactgcgcgacgagcttaccgatcaaatgtgggccgaagcgcagaataagcagtggcgaaacaaagccgtcagtgatacctactaccccggttccgttttcaaaatggtcacgggctccatggcaatggaatccggcgtggcctccgaagactccacgtacacctgcactggccagtgggtgtttgatgatcccaccatcgaccccatcagctgttggtaccacgccggtcacggcacggaaacgctggtggacggcatttgcaattcctgtaacccgtacatgatctggctgggtcagaaaatgggccgccacacgttcttcaatttctttgaagccttcggctttacgcagcgcacgggcatcgacctgcccggcgaagcagacagcctttattttagtgaagacgagctcaatatcgtcgagcttgcaacgtcttcgttcggccagaacttctccatcacgccgatccagatgatcacggccattgctgccgtggcaaacggcggttaccttgtgcagccgcacgtcgtagaccgcatgctggacagcgacggcaacattgtcaaaacgaccgataccagctacaagcgtcaggtcatctccgaagatgtctccaagcgcatgacggccattcttcagaaaaacgccacaagcgaaagcggcaaaaacggctatgtcgccggttaccgcgtggcgggcaagaccggtacgtccgaaaaagtcgcactgtattatcaggatttggcagagggcaacgaccgcggcatgcagtacgtcgtttcctacggcggctacgccccggcagatgatccgcagtacgccttgctcgttttctacgacgagccgcagatcggcggcgcgtccggcggcacgcaggccggcccgatcttcgctgccatcatggaagaggtgctcccgtaccttggcgtagacccgcagtatacggaatcggaatatgaaaatctctccgctaccgcgccgaacgtcattggcatgaccatggcagaagcgaaaagccatctggaagagcagggcttcagcggcacggttgtcggcgacgccgaagacgacgcgctcgtcacagtgcaggtgccgtctccgggcgcatctatcccgaaggaaggcatggtcgcgctttacaccgaagagccggatcccgaaacgtatgtggaagtaccgcgcttcatcggctatgacatcgatacttgccgctacttggcgggccttgccgatgtgcaggtgctcgttgtgggcgacggcgattccggctacgcacaaagccaggatatcgcagagggcaccaaggtcaagcgcggctccgtcatccgcatttcgtttgtcagctccggcggcgtcgaagcggcgggcaacacctcaacgaacagcgaagagtaaaaacatacattgagagggtaggaaaggaagttcataacgtatggatattgtactgtattgccttgcaatcgtcattgcggcggttatcacagggctgctcggttacttcatggtgccgtttctgcacaagatcaagttcggccagaccattcgagaggtcggccccagctggcataaaaataaacagggcacgcccaccatgggcggcatcatgttcatcatcggcagctccgtcgcggcggtcatctgcatcgcatttttgtggttgaacggtggcgcggaaacgcagctcatgctcgtcaaggtcatggcgggcgcgctcatggcggtgggctttggtatcgtcggttttttagatgattacatcagcatcaaaaagcatcgcaacctcggtctcaccgagattcaaaagctcattttgcagttcatcatcgtcggcgcctacctgctttccgtcgcacttgcgggcggcaccaccgaaacggttatcccgttccttggctccgttgacctaggcttcttctactacattctggcggccgtcttcatcgtcggcatggtcaacgccgtgaacttcacagacggcatcgacggcctcaatacgtccgttacgctcgtcgtcgcactcgtcttctctgttatcgcgatgcttttaaatcgcgtggggctttcactttacgcggcggccatcgtcggtgcgatgatcggcttcctgttctggaacgccaacccggctaaggtcttcatgggcgatacaggctctctgttcctcggcggcgcagtgtgcgcgctggcgttcggcgtggatatgccgattctgctcatcctcatcggcatcatctatattgtagagattctctctgttgtcttacaggttacatactttaaaatttcgcacggcaaacgcattttcaaaatggcgccgatccaccaccactttgaaatgtgcggctggaacgagaataagatttgcttcgtgttcagcggggttacgctttttgccggcatcctcggcgtacttttggcggtgttcggctgctaaacgcctgaaaatgggataaaatagaaatcaactgaaaaaaggaggtttgcagcaatggcgcagacaagacgctccacggcgcgcgggctcgaacaggtcccaagccgccggttatccgccgtgcccgcagaagaggcggcatccgcagccgcaaggcgcggcaaacggcgtgggcgcatcaaatatagaatttttactttgggtctcggccttgacatgaccatgctgtttttgatccttgtgctgcttgccgtgggacttgtcatgatgttctccgcaagctatgcctacgcgtattactactacggaaacagctattacttcattctccgtcagggtatgttcgccttggtcggtgttgtgctgatgcttgccatctccacgttcgattatcaccagcttcataaactgaacctgcccgttttcgccgtctccattcttttgcttttgatggtgctcgtctttaagggcacaaaattagcgccgaacaaaggcggcgcggtgcgctggctgaacctcggcttcgttgaattccagccgtccgagatcgcaaagttcgcgctcatcttgatgtttgcgcacctcatcgcgctgtacggcgaaaggatgaaaaccttccgctacggttttttgccgttcttcggtattttgggtctcatctgcgtgcttgtaatcgcggaaaagcacgtttccgccaccatcatcatctgccttattgcgtttatcatgatgttcgtcggcggcacaaagttccgctatttcgccgttatcggcggcgcggcggcagccgtcatcggcgcgctcgtgctgttttcctcaaaatttgcctacgccatggaccgtgtccacggctggcttgatccgttcaacccgccggagggcgtcgatacatggcagacggtgcagtcactctacgccatcggctccgggcagctgctcggcgtcggcatcgggcagtcgagacaaaagtatctctacatcccggagccgcaaaacgacttcgtttttgccgtagtgtgcgaggagctcggcttcatcggcgcgcttatcgtcattatcctgtttgcgcttttcatctggcgcggcgtatatatcgcgctgcatgcgcgtgaccgcttcggcgccatgctggcgcttggcatcacgttccagttcggcattcaggccattctcaacatctgcgttgtcacaaacaccatcccgaacaccggcatcagcctgccgttcttcagctacggcggcacggcgctcatcatgcttcttgcggaaatgggcgtgctgctgtcggtctcgcggcattccaatacagaaaaaatgtaaaaggggtattcaattatgcgtgtgttatttgcaggcggcggcaccgccggccacatcaatccggcgcttgcggcggccggttatctgcgctccaagcagccggatgccgaaatcctgtacgtcggcaacaagggcggcatggaagagcgccttgtgcccgcagcgggcttcgatttcaaaaccatccgcatctcgggttttcaacgtaaattaacggcgaagaacatccgccgcaacatcaaaaccgtgttccgcctgttctcctcgtccatcgagtccgagcgcatcatcaaggcgtttaagccggatatttgcgtcggcaccggcggttacgtcagcggccctgtcattcgcgccgcacagaagctcggcatccccaccgtcatccacgagcagaacgcctatcccggcatgacgactaaagcgcttgcaaagcacgcggagtgcgtcatgctcgccgtagaggacgcgaaaaagtacctcgaccgcaaagataactgcgtcttcaccggcaaccccgtgcgcgtttccgttttgcaggccgagcgcgaagccgcccgcaaggcgctgaatctcgatgatcgcccgcttgtgctgtcgttcggcggcagcctcggcgcagcggcgctcaataaagccgcggcatacatgctcggtgaaagcgccaaagagaagaaatatcagcacatccacggctatggccagcacgatgaaaaattcctcgacgaagtgcacgcagcgggtgtaaaggaagaagaaaatccgcagattcgcatgcttgagtacatagacaacatgccggagtgcctcgccgccgccgacctcgtcatcggtcgtgccggcgccatcaccttaacggagatcgaagccacaggcaagtgctccattctgattccgtccccgaacgttgccgaaaatcaccagttccataacgccatggcgctcgtgaaccgcgatgccgccgtgatgatcgaagaaaaagacctcaccggtgaaaagctgtgggaaacggtgaacaccatcctttccgagccgggccgcgccgaagagatcggcaaaaacgcgaaagccatggccgtgctggacgcaaatgaccgcatttacaacatcatttgcgaaaaagcaaaaaagtaaaccgtaaaacgcatttcaggcggacataccccaaaatttttccgctgcatactatgaccgtatccaaaggcgcgctttctgccgccttacagaatacggggtgtgtatatggaagaatatgaactggaacatacgggctgtgcccggcaggaagcggttttggtgcgcggcggcaatcgcctttgcggcgagctcaccgtgcagggcgcgaaaaacagcacgctgccgctgcttgcggcggcactcctctgtgagggcgaaacggtgctacacaactgccccgcactgtccgatgtgcacacggcagtcaccattttgcggcggctcggatgccgctgtacccacacgggcgataccttaacggtctgcgcggacggcatgacccgctgcgatattccccacagcctcatgcgggagatgcgctcgtccatcgtgtttttgggcgcgattctgtcccgctgcggcgaagcaagattgtcgtttcccggcgggtgcgagctcggcccaaggcccatcgatctgcatttggaggcgctgcgcaagctcggcgcagaaattcgtgaagagcacggctgcctgttgtgcaccgcgcccggcgggttgcgcggcgggttcgtctcgcttgcgtttccaagcgtcggcgcaacggaaaacctgctgctcgccgccgcccgcgccaagggcacaacggtgctcacaaacgccgcgcgtgagccggagattgaggatctcgccgggtacttaaaccgctgcggcgcacacattcacggcgcgggcgaaagctgcattgtcgtcgaaggcgtgccgcacctttacggcagcacatacaccgtcatgccggaccgcatcgccgctgcaacatacatggccgcggccgccgtcacgggcggtacggtgcttctgcgtgatgtcaacagcgagcaccttttgccggttttgtcggcgtttgaaagcaccggctgcgccgtgatgcagtccggcagcgaattattattgcgcgcaccgcagagattaaaacccgtgcgccacgtgcgcaccatgccgtaccccggtttccctacggatgctcaggcgcccgtcatgaccatggcggcggtgggggacggcaccagtatttttgtagagaacatttttgaaagccgctataagcatgccggtgagctcaaccggctcggcgcgaagatcaagttagagggcaaggtggctgtcatagagggcgtgccgcagctttccggtgcgccggtctcggcagaggatctgcgcggcggcgcggcgcttgtcatcgcaggccttgcggcgcagggcgaaacacaggtgatgcacccgcagtacatcgaccgcggctatgcgcactttgaagagaatttaagggcgctcggcgcagacgtataccgaatatagagcgaaaagtaagagataaaacgtgaaaaacggaggctgaacatggcgcgtactccacgcagcgcagcggaaaagctcgcaatgagaaagaaaaaaagcagggcgctgctcctgttcaatataatcgcattcagcgtcgtcgtcatcggcgcggtccttttgtgcatcttcgtgtttttcaaggtgggcaacgtcacattcacgtcagatgccggctacgatgaagccgatatccgccgcgtgtgcggcatcaacaagggtgataacctcgtgctgctggaaacggaaagccgcgaaaaagcgcttgagcaccgtttcccgtacattgaaagcgcaaagatcgtaaagcatatcccttccaccattgaaattgaaattacccccgccgaaacggcgttttccgtcgcgtgcgacgcgggctatctctatgtaagcgcttccggcaaggtgctggagatcgcttcacagccgtgcgagggcacgactgtggtgctcggggcaaatcccacgaacacaaagcccagcgaaacgatcacgttcggcgatgattccgtcaaagaagtctataacgccatcgcggagcagatgacgaaaaacgagacgcagaacgtcacggagatcaacatgacgaacccctacgaccttacgctgacgtatgataaccgcatcacgttccgttttggcaacatgaacggcatgtcctacaaaatggcgtttggcctcgagatgctgcgtcaaatggaaacgagcggcgagatcaccgaggagaccgtcggctccatcgatctttccgttgtgccggagaaaaataaggcgttttacgaggaagaccgcaccgcagcctccgccacgcccgcacccggtgatgccgcaggccgcacggacggctcagacagcaccgcaaacggcgacggggagaacggcgatactgccaatcccacgggtgataccgacggcatcacggaccccgcagcagacgatagcggtgacaacacaggcgacgccgaaaacgtgtaaaatttggaagcgtttcctggtttttcacaagtttttcgggtaatttgaacagccccggcaccatagatttcccgaaaaccgctgtaaagtaaaaatatttgcaaaggctcacttttttgccgctttcatcttgaattttggagggaaaagtgataaattatagtgtatgaagctatgtaaagctgaaagactgtaaagaactgtaaaggtatggccctttatgggacgctatccggcggatttgatcgaagctcgagagaaaaccgttttgaatccggaggcggcgtgatgaatgaaaatcccggatccgtgcggatcgttaacggttaaagaccaaatcaaggaggaacataaaatgccgtttgaaattgataacatgcttgaagagaccccccagaccattaaggttgttggtgtaggcggcggcggcggaaacgccgtaaaccgcatggcagatgccggcgtgcagcacgtcgagctcgtctgcatgaatacagaccgtcaggcactgtcccgctcgcaggccaagacccgcgtgcagatcggtgaaaagaatacacagggcagaggcgcaggctccaagccggaggttggcgcaaaggctgccgaggagagccgcgagctgatcgcagctaccctcaagggcgcagacatggtcttcgtcaccgccggtatgggcggcggcaccggcacgggtgcagcaccggtcgttgcagagattgcaaaggatatgggtgccctcaccgtcggcatcgtcacaaagccgttcgcttttgaaggcaagcgccgtatggatcaggcagaaaagggcattgcagagctgcgcaagcacgtcgattccctcgttgtcatcccgaacgaaagactgaagctcgtcagcgagcagcgcattacgcttgcaaacgcattcagcatcgccgatgacgttctccgtcagggcgtacagagcatttccgacctcatccagatcccgggcatcgtcaacctcgacttcgaggatgtcaagtccatcatgcaggatgcaggctacgcacacatgggcgtcggccgtgcggcaggcaaggacaaggcagagcaggcagctgttgcagctatctccagtccgctgcttgagactgctatcgcaggcgccaagggcgtcatcatcaacatcaagtcctctccggacatcgccctcgacgagatcgatgtcgcgtctcagctcatcaccgagcgcgcaagcgaggatgcaaacatcatttggggtgctgcattcgacgagacgatggaagacgagatgatggtcaccgtcatcgcgaccggattcgacggcatgaacggcgaaaagacccagaagcccgcagccccggctatcagcgacgcagaccttttcggcaacccgtctgcaccgagcaccggcagcacaacttccgcgaagagcgacgatgataccttctccgacatcatgtccatcttcaacagaaagtaatttagaattacaaatcaagcagggtatcggtctcgataccctgtctttataaaatgtacttttgggaggaaaacaaaatgagcttgatcaaaggcattcaccacgtggcactgcgtccgacgtatgcgcagtttgaaaaagcaaaaacgttctatcttgacctgctcggcctcaaggtcgtgcgccagtggggcgacgaaaaatacccctgcatgatgatctccaccggggacaacagctgcatcgaagtgctgcccgtcccggaagagaacgatgtgccgctggaaggcaagtttgcccatctcgcgctcgcaacagatgataccgacggttgtgtcgcccgtgtccgtgaagccggctacgagatcaccatcgaaccgaaagatgtagagctttccgacatcaccgcgcgcattgcgttctgcaccggcccctgcggcgaaatcgtcgagttctttgaccagaagtaagccgatttacaaaattaaatcacccaaaagcagagtttgaggagctttcctcaagctctgcttgcatatttggcgggttttcagccgctaaccaaaaggagattttcgttatgaccgatctcattttgcggatctttgtccgcgatcataaaaataccgaggatcctgccgtgcgcgacaaatgcggccgcgtggcgggtgccgtcggtatcgtcacaaattttctgctttttttaatgaagattatcgtcggcacggtttttcacagtgtttccgtcacggccgatgccgtcaacaaccttacagattccggctcgtccgttgtcacgctcatcggctttaaaatggcaagtaagccggcggatgaaaagcacccgttcggccacgcgcgcatcgagtatctttcgggcgtcatcgtctcgttcatcgtcattttcctcgggcttcagctcggcatgtcgtccattgagaaaatcctcatgccggaggaaaacgccctcacgcccgtcgccctcgttgtgctcgtcatttccattctggcaaagctctggcagtgcctcttttaccgcaaggtcggccgcatgatcaaatccgagtccgtcgaagccacgtccaaggacagccgcaacgatgtcatcgccacaagcgtcgtgctgctcggcgccgtcatcaccatgctcaccggcgtgaatttggacggctacatgggcgcggcggttgcgctgtttatcgtgttctccggcgtgcagcttacaatcagcaccgcagatcctctcctcggccaagcgccggagggcgaactcgtacagaccatcaccgagaaaatgctctcgtaccccggcatcatcggcatgcatgaccttgctgtgcacaactacggcgtgggccgctgttttgcctctgcccattgtgaggtcgatgccaaaaacgacattctcgtcagccacgatctcatcgataacatcgagcgcgatttcagccgtgacctcggtatccacatggtcattcaccttgaccccgttatcgtcggcgatgcccgcaccgatgcgctgcactgcaaagtgcagtcgctcgtcaccgcgctgtaccccaccgtcaccattcacgatttccgcgtcatctggggcgttacgcacagtaatatcgtgttcgacgctgccgtaccgttcgcggtgaaggacagcgacgccgtcatcacccaaaagttagaggccgaaattcaaaagctcgatcccgattatcgcaccgttgtcaccatagaccgcagataagtaaagcacgccggttcccgaaattcatcggcaaggggcgtgctttttaatatttatatcaaattataaatatttatttcaacctgccaagcagcgttttgaggaaatcatacacgcggtcaaacgattttagattcatgtattcgtctgtcgtgtggcagttttcgccgatgggcgcgaacatcacaatgtccagcccctccatgcgcggcagtaaagagcagcattcaagtccgcccgggcacgccgtctccaccatctcgtggccgtacacttctttcatcaggtcggccgtcatgcggcgcatgtaggagttcggccggtattcccaggagtcatagcgcaggctcgtctcaagcgtgaagccgcagagtttagccaagcgcttcacgcggccgagcacaccgtttttaaagctgcggctcgccgcacggtcggacatcaccagttcaaatgcgccgccgtttaacgataccgtgcccacgttgttcgtcgccgtcatctcctcgcccgcggtccggattgccaccgtgttcgagggcatcaggtagatcaaatcgacaatcgcctgcgtatcagcatccgaaagcatctcgttcgccgccgcatcgcggatttcaagcgttaaattctgcttgccgtcctgcaattcgcggtcgatcttctcaagctcgccgtttaaaatcgccttcactgcgtccggcttgtcgcagagaattaccgttttcgtctccaccggcgcatagttttccgcttcgccgcccgccatggtggaaagtcggtacgccgcgccgttttcggaaagcgcatgaagcaaacgcgccgcgatcttaatcgcattgaactgctccgggtgcaccattgcgccggcgtgcaccggctgcacgccggaaaccgtcagcatgagggccgcgccctttacaggctccgtctcgcacgttttcgtcagtttcatcaggtcgctcgtaaagcaggaaacgcagcttgtgtattccaccgtctcgcccaccacgtcaaggccgatcattcttctggatttcagcttgtccgcgtccagcgcgtccacgccgttgcagccgttttcctcctgcaccgtaaagacgagctccagcggcgggtgggggaaatcctcctccatcacggccagcatgtacgccacgccgtaaccgtcgtccgcaccgagcgtcgtgtccttcgcgcggatgtcgcccttgtcatccacataaatttcaatggggtcatgcgaaaaatcatgcgtgctctcgggtgttttcacgcacaccatatccatgtgcccctccagcatcacgacaggcgcgtcttcgtaccctttagaagccggcttgcgcacgatgacatttcccaatttgtcctgctcgtagtttaaaccgagcttttccgcaacggagcacacgtagtcgcttacggctttttcttcggttgaggggtgcggaatgccacagatcgcctcaaaatatttctggttcggttttgttcggtcgagtacgaatgccatgttaaacgtcctttccgcgcttacgcctccgaagaggagatgaggtatttgaaaatctgcagcttgttttcttcgtacagcccaagctgctcgtataattccttgtaatagctgaaaagcgccgtgcgcgccgtaatcgccgtgcgcaccttcgtcagatgcaccgcgctgccggggttgtcgtagtagttgtagattggcgcggtcagcgcaaaaaaccgttctgcatagcgtatgtacgtcaaattaaaatacaggtcttcgctccacgtcatttcctcgctgcaccgcacgtccgtgtgtgcgcgcaccaaatcggcgcggtaaagcttgttccacatcacgccgtagtaaaagctcgccggctcctgcatcagcccgcaggcgaattcttcctttgtcataaagcccatcggcagaaagccgaacgtctgaaatttcaccagccgctccgtcagctgcttctttttattcggcaaaagcgggtcaagcttcgcttcctttttcggcttgtacggcacaatgcggttatacgccgcaatgacgagatcagcgttgttatcctccgcacgctgaacgaggagctctgtcgcaaacggctccagtgtgtcgtccgcgtccacaaactgcaaatatttgccccgcgccatgcgcatgccgaggttccgcgtcgccgaaacgccggagttttccttatcaatcaaaacgatgcgcgcgtccgctttcgagagcatctcgcacaccgggtagctcacgtccttagagccatcgttcaaaagcaatatttcaagattttcatacgtctgccgccgaatgctctccacgcagcgcacaatgttgttctgcgcgttgtagatcggcacgatcacgctgacaagcggtttctgcatcaaaatacttcctttcctgcatcatgctccgtttttccctattttaccgcagaaagttccggaagaaaagactttttgaacattctgcttgcaaatccggtaaacacaccaaattgaccagtgcaaaattagccaaaacgcatattgacttaaagcaaacttttaatgctatagaaatgtatgcggagtcacacccgcacataacgaattcttaggaggagttttcgtgaaacccaaggtttatttcacaaaaacggtcacccctgaaaagatcatggaaatgtataagcagctcgattgcaagctgcccggcaacgtcgccattaaggtacattccggcgagttcggcaacaaaaacttcctgcgccacccgattgacgaaccaacccgaatatagtagaatacaggtaaagaataacatttggaggattgggatatgaacaaaagtcaaatggcaaagcttgcggcagcggccggtgtgaacggccttatgtatgacccaaatgcagagggcgttttcggcaatgtgcaggggtataccgtcaccattatgccgaacgtcaacaaccgcgtctactgtatgctttcgctttcggtctcgcgcatgggcatggcgccgaatcccgcagatttcaaaccgctcgagaaaatgaataagtttttgagcggctgtaccgtgcagcgtttccgcgtcaatttccttgtgaagctctccggcaataaagataaaatggcagagggcctgcgcagtgcgcttgatacgcttatcacgttcctcagaacaaacgggtatacaaattgctgcgagcattgcggtcgcccggagggtgtagacgcctacaccgtctccggcaacgcgtaccttttgtgtgaaccgtgcttcgggcaggtcagcgaagccgccgcgcagcagaaccagacaaaaatgcagaagcaggagcaggttttgcccggcatcgtgggtgcgctcatcggttcgctcatcggcgccgtcgtcatcgtcattgtcggtcagctcggctacgtcgccgccgtttccggccttgtcatggccatctgcacgttaaagggctacgaaatgctcggcaaaaagctcggcacaccgggcatcatcatttcctgcgttttgatgctcctgatgattttccttgcgtatcaggccgattggtcaatcaccgcggcgcagttctatgagaccgatttcttcaccgcattccgtgccatgatggatcttatcaaagaaggctatgtcgattccggcaattacttcggcggccttgcacaggtctatctcttcgccgttatcggtgccgtacctaccatcatcgccatggcaaagggcgcaaagcacatggtcaccaccgccaaaatgcgcagcgcctacgcacccgtttcggcacccgcagcggcttccgcgcagatgcccgtgcagcccgcttcttcgcccactgctccgcagaacgtcgaaaaagacatcgaaaagtagaattcaaaaaccatcgcccgcaggcaaccatttttcgtgcctgcgggcgatttttatgtctttttgttctgatttttgagcttttcggcctctgcctgcgctttttttaactgctcctgcgcaagcttggcgcgcttcattgcgtcttccgttttctgtgcggcacgctccgctcgcttttgggcttccgccacgcgctgccgcgcttcttccgcgagatgtctttcttcgtctgcatcgggattttgcacggtgtcctgtacgggttcaggcgcaggtttaatattccagctcaaaaattctggcgcagatgggggcggggagatctaccgtcagcgtgcccttttccgggttccatgcacatttcgtgttgtggtttgcggggtatgcgcagcgcacatttacgtgctcgttgccgcgcaggaaatccacgggcagcgtgcagcggccgtccggcgcgccgcgtctccacacggtgatgtacgctttgtgcgcggttttaaggcccagcgagacccacgtgtccgcaaagtgcgacgtaccgagcggccagaacggcagcgcgcgcttgatgtcgccgcggattgttttgtaataatcgagcgcttccttgacgagcgtgaagtcctcctcgggaatttccgccaaatgaccgctctggtggatgcgctgcatcagtgcgttgcacatattaaatacggcttcctcgcgtccgccgcctttcatcgggtagctccaaatggcgctctgctccggcgtcagacccgagggcgcgttcgctgcaatggacgcatagcgcaggtagtcctcctggtcgctcgtagactgaatgctgtggcgcgagagcatcgcgtagtcgatgcgcatgccgcccgaggaacagttttcaatcacaaggtcggggtagcgggcaaagacggaatcgagccaagcaagatatgcgcgctcgtgcccgagtaaaccgtcgcccacgctgtcggcgtttaattccgtgccgatgcccggctcaatgttgtaatccatcttgatgtagcccacgtggtagtcgcgtacaaggcggtcaacgacctcatttgcgtgctccacgacctccgggttgcggaaatcgagctgccagcggctgcggtcgtgcacctttttgccgtggcgtgtgaagaaccagtccgggtgcacgcatgcggccttcgggcagcaaatgcccattacttcaatttcgagccacacgcccggaatcatgcccttcgagcggatgtagtccatcacttcctcaaggccgttcgggaaacgttccttactcggcagccattcgcccacgttgtcccaccagaagccgtccgcgtaccagcctgcgtctacgcagaagtattcgcagcccgccttgtgcgccgcgtcgatgagcggcagctctttcgccgttgtcgggttgccccacaggcagttcatgtagtcgttgaaaatgacgcacagcttctcgttgtctgcatttttgcggcgaatcatgcggcggtacttcgtcagctcgcccatggcgtcatcaaatttgccgagcgtggagcctacgcacaccggcactgtcgtgaatgtttcgcccggctgcaaattcttccaccagtgcgattccgtttccgtcggtccgcttaactgaatgtagaagttgcccatctggtcgctgatctcccagtgccacgagccgttgtgctcaatctgccagaataaattggagcccgtttccgtgttttcaagcagacccatcggcaggtattcctttgtagaccagttgccgatgttcgtcgcaccaatcaccttagaggagcgctgaatttcctcgggctggcagcgggcgagaccgagctgcgggaaggtgtagctttcccactgcatttcgcgctgccagccgttgtgtgggtaccagacgcgcattttgtcgtcggtcgaaagcataccctctttttcgatgccggtgagggcaaaggaagaaacgtattccagcccctgcggctctgttccgacatttttcacgtccgtccagcagcgtacagcctgaacgccgttataaaactgcatgtgcgaaatcgtttcaataccacagatcttatcttccatatggatttccagcttgcggccgaactcgttgtgcttgtccgcaaaataaacgagcttcatgcggtcgccggggcttgtggaaatgtatttgttgccgtggcgctcgcccggtcggttttgcccggaaatcataatttccaagagattgtatcgctcggtgttcaggcgcaagccgcccgtttcgcggtcgtgcacgtgcagcagactgcgctcgtcaaaggggagcgcagagaagtgcagcagcttgcagccgaaatcttctgtcttttcaaaaacgagatgcagcccgttttcgtcaatttgaatcaaatccatagtataagcctttccgcagaaaaatctgctgtgatctatgctgagttgtctgtacaaatagtagcacaatcggagaggcttttcaaggggattatcggtcgcggctttgctccgcacgcatgccgagcgcagaatactgcaaagcgcgcgaaagccgtgccgaagccttttgcaggtgcttgcacaccgtgccgcgcgtcaggtgaagctcgtccgcaatctcctgcatcgtcagccgctcgccgtagtaaagctgtacgcagtcgcgctggcggtcggtcagctcattgccgatggcgcgccgcagcaaaacctgcgcttctaaaagctcatttttgtttgtctctgcgccgatgcggctgagcagcttcgcctgccgtgcaccggcggaaaggggcttatatccgctcacgaaaccgccctccttccgcgcttttgcagcgcatggcctgttacaagacactccaaatacatggtgtaaagcatctgcacacgctgggcctgctcgcctgcaatgtcatagtcgcgttcggcgcggatgacaagcagccgccgtttgatgcgctccgcctcatccaaatactcctgtccccaggaaatgtaatcgttcacttgcagtcacgatcctttcgtttcaaaatagaacatgtgttcgtcaactctcatcataaacaaaaatttccgaaatgtcaatcgaacacggaacaaatgttcaaaagatgtcctatgatgtcctataatgtcctgcgatgtccgcttttctgcatatttatatggaattatttacattttggggctgttattttgcgcttttttgatatataataaaggtgtatttaagcttgaaatgactgaacgccttggcgttttgaccgaaaggagttttaccatgaactttttgaagaatatctcggccgcatttaagaccgccggcggcgccgtacagagtgctgtgaaagtggtagaggaaaagaaccgccgcactgcgctcatgaatcgcctgcgcaccgttatccgctgtgaggaaaaagcagaggagcgcgcctatctcgctctcggccgctactactaccacaacctgcgcgatgcagagaacaccgttacggagccgtactgcatcgacattgaagccgcccagaagcgcatcgatgccgctgtggagaagctggaagccctgacccgtgagggtgacagcgaagcggaagaagaggagatcacccttgatgacgtgcaggagtacactcccacgccggaagaggaaaaggaagccgaagaagctgcattcgtgccggacggtaccgtagacgaagccgtggaagcggcagagcctgccgccgagcagccggaaacgactgagcccgaaaaagacgaaagcgaagaagttccttacgaataatgcgcttaaaaatgaatgttaaaaggcggacctgaggcccgcttgattccttgcgcggaaaaacgcccaccttttgcgccggggcaggttccgtttgcagaaagtgagtgaatttgatgtctacgaagatccagaaagatattgtctgccccgcctgtggccagacgcagaaattagagatgtacacaagcgtcaatgcggaggaaaaccccgagctgcgccgcgacattctgcgcgaatccatgtttgactgggaatgccgccactgcggctacaccgcgcagatggcgtatcccatgatctaccatgacccgatgaacgcgtttatgatctgcctgcgcccctccggcgctgtttccggcgcggagcctatccccgccgtgcgcgcgctgaaaaagcgcagcgtgaaaaacccgcaggagttaaaggagaaaatcctcattttcgaggccggcctcgatgatgccgctgtggagcttgtgaaaaacgccatcgtcaccgtggtgcgcaaaaatctggacggcaatgtgcacgcctatttctgcgccgcaacggaggaggagctgcgtttcgcactgttcgtcaagggtcgtcaggagcccgtgtaccagaccaccaaaatggccgtgtaccgccagtcgcaggaggttttgcgcacgctcgattacaaatccccggacgatttcgccgtcgtcaactccaagctcgcccaaagccttttggacgaatataagtcgatctaacccaataaaagcaaacggcaccgcgtttttgtaacggtgccgtttttctatgcgcgcatgtgtacaggctttgcgttttgtgggtttacgggtaaatcacttcggcgcgtgtcacttcgccggtgtcaaaatcaccgtaatgcagtgtaaaatacaacgtttcaccgcttgaagcgtcctgcacttcgtcgatgagcaaaagtgtttcgttttgtgtgtctttcggctgcaagcggtaggagacgacgttcagtttctctccgagcgcagtctcgcctgttgcgtgcgaaatctcacaaatgttgtagtgctccgtaatatatgccgcggaaaagccggttttcagcttctctgcggggtgcagccggatgtgtggcacggttttcgtcagcgccgcgaccatctgctccgtaacgccggtttggatgttctccgccgggtgcagcgcaggcaggctttctgccgaaacggaaatcgccaagataaatgtcaaggtgagcgcaatgcaagggataatgagctttttcatgggttcctccttccataacgaaaaagtgcaaagcctgtgttatagcttgagtatagcagagcaaattcaatgtgtcaataattttatattaaattattttaataatgtgctttacaaattaaattttctgtggtaggataaaatcacagaatttatgcaaaggggaggaatgacaatggcgaataacgacagcaccaagcgcgtgccgctggagcttttgtgcatgcttattttaaaggagggcgaccgctacggctacgagatggtgcaggagatcgaatcgcgcagcgggggacttttgtcgttcaacttggcctcggtgtacgtcgcactgcggcggttggaggagcgcgtgtgtgtatcttcccgcaccgaaatgacggacgccgcccgcgcccgcatgcgcgtttactatcatttggagcctgcggcggaagcgtatctcacggagcagaaagaggaataccgccgcacggccgtaggtgtgcagaacgtgctgaaaagctgcgaggtgcaacatgaaaaggaagcctgaaagcgggtttgagcagtatttacgccgcgtgtatcgggcggtaaacggcacgcgcgcagagaagaagcgtgaggttgcccgcgtgcaaagccttttgtgcgagattccccacgcagaaacgatgtcgtatgacattctttgtgcggtcgccggtacaccggagagctttgcagcgggatttcaaagccgccgaacccaaagtccgctcgtgctttcggcagttatgctgaccgtgctcgtgctcgcgttcatactcggcgccgcaatgggacaagcgcgcgaaaagacgcagaccggcggcgttgtgatgagctatcgctacgaagacggcagcttgcagacgcttttggaggaaaggccggagctgctggggtgaaagttttgtaaaaaagactccctcggacagagggagtcttttaggttatgcgtgaaaatcgatgcgatgctcaattaaacattgcgcggattgaattctggtgctgctcggtattgacggccatttcgttgacggcgaaaagcacgtccgtgatgccgtgctccgtgcagtaggtcggcaggtcgccttcaaagtagcggaagtccatcacgtgtacctcgtcaaagcttgcgccgaggaacggacccatggcgttgccgtaggagtccttcaccacaagcagcttgcggcccgtggaaaggtcgtggttcgtgatgcgcacgcagcccatatcgccgtgcaggtacatggcgtagccgaggctctcgtcgtggctattgaggctgtcggtttcctcaaaatactgcccgtcatacgaaatttcgcatgtgtagttgtacttcgggtcgtagagatcgagcgtatcggggttgttgttcagcacgtcttcgctcgtaacgtaggcaaggtagcccgtgaagtcagaggacgttttcgtgaagctgtcgagcgtcgtgggcgttacacctgccgcttcgcagaacttttcatacgcgtaaaacgcgccgagcggcgcccagtgggtatcggtatcaaaataaatgtcttcgttgttgtgcaggttcagcgcatcgtaaatatccaccgcggtgatgcttgcggaaagcgtattgttgaccgccatggtgttctcacgctgggaagcttcctcatagtaattgcgcacgcgctccggcacgccgaattccgagtgattcgggatgaccatgctgtacacctttgtgccggaaagctgacttgcacagtcattcagcgtttcggcgtaggcggtcgccatgctgtcgctgccgtagaacatttcaaagcccttgttattgtagatgagaatgcccgaggacatgtagccctccgtgccgtcgtcatagatcggcggcggtgtcggctccggcgtggcggtcggctctgcagtgggagtaggtgtcggctctgccgttgcggcggcttccggtgtgggctccggcgtaggtgtggcggcagcgggtaagagcttgccgaacgcaccgaggctgtacgcaatgtaccccaaaatgccgatggccaaaacgatcatcacgatgacgatgggcacgacgggcgagtgctttcggtgcggcttatcgtcgtagccttcctcatattcttcatactcttcgtagtcgtcttcgtcctcatacggctccggccgtggagcgggtgcaggcgcggggcgctccgagcggggcgcttcctgttgcggcgctgccggtacgggatattcgcgtgtttcttcaaagccctcgggaccgtttttcggcggcttcggggtaaaatgcagattctctatggaggaggggacgcgcttttcgctttgtgacgattgctttgcgtacagcgtttccggcgtcagctcggaagccgcgctgcgcgggtcagcctttgcggcgcggcgcgctctgtcttcggcagaatacgggcgctgatttttgccggccatgtgctttgccattggatccatcctttctgtaaaaagggtcgtttattttctcaagaaaaaagccgcgcggaaacagaccgctgcggcttttcgatttccatgtccattatactggcttagaaagaaattgtcaattcccgtatgctcagtgtgcgaccggcaaataccccactttcttcatgaccttttgcaaagtacggcgtgcaatggcctctgcacgcggcgcggcctcgctgtagcacttttcaaggtatgccttgtccttgatgagctcgttatagcgcgcctgaatgggctcaagctccttgacgacggcttcgcccacggcggtcttgaaatcaccgtagccgcggccctcgaattccttttcgatttcgtcatagcttttgcccgtaatacagctgtaaatgcccatcaggttattgatgccggctttgttttcgccgtagtagacgtgggcttcactgtccgtgacagcgcgtttgaactttttcatgatctccgccggggtatccagcatagtgataaagcccgccgtgttttcatcggatttgctcatcttcttcgtcgggtcctgcaaagacatgatgcgcgcaccggttttcgggataagaccatccggcacgacgaatgtcggggagtaaagcccgttaaagcgctccgcaatgttgcggcaaagctcaaggtgctgcttctggtcggcgccgaccggcacgtaatcggcgttatacagcagaatgtccgccgccatcaggcttgggtaagtgaacagccccgcgtttacgttatcggcgtgctttgcggatttatccttaaactgcgtcatgcgggagagctcgccgaactgggtgtagcaactcaatacccatgcaagctgtgcgtgctccggcacctgactctggatgaagaaaatgctcttttccgggtcgatgccgagcgcgagcatcatcgcgtaggcggaaagcgtgtttttgcggaattccgccgggttctggcgcacggtgatggcgtgcaggtcggcaagcgcgtacacgcactcatagtcgttctgcagcgcgacgaagttcttcagcgcaccgaggtagttgccgagcgtgaacatgcccgtcggctgaatcatgctcaaaacgcgcttcttttttgtttcgggtgtggtgtttacggtattttccatggtaattttcctctctgatatcctttatttttccaccatctcgcggatggtctcgccaagcagcgtgatgccctttgtgagctgctcatcggtcggggtggagaaattgatgcggaacgcgtcgcacggctcgttttcatccgtcaaaaatgcggtgcccggcacaacgcaaaccttcttttcgagcgctttctgtacgaattccatcatgtcaacgcccttcggcaggtggcaccacgcgaacagaccgccgttgaacgggtcccacgtgatgtacggcgcaaggtgcttttccatgaggtcaaggagcaaagcgcgctttttcgtgtagatttttctaagccccgcaaggtgcgcgtcaaagtcatattccgtcatgaagcggtagcacagaacctgcgaccagatattcgtgtgcacgtcctgcccctgcttgcagacggtcattttggcgagaaccggctttgggccgatggcgtagcccacgcgcataccgggggagatgaccttagagaacgaaccggcgtagatgacgatgccgtccgtatcaaacgacttgatgctcggcagcggctcgccttcatagtaaaggtcgccgtaggggttgtcttcgagaatcattacgtcgtgtgctttggcgagctcatacaggcggtgacgcttttcaaggctcatcgtgatgccggaggggttctggaagttcggtatcgtatagatgaacttcacgttcttttcggtctcgagcgccttttccagcgcttccatgttcatgccgtccgtgtccatcgggatgccgacgagctttgctttgtaggaacggaagtcgtttaaagagccgatgaagctcggcgcttcacaaataacggtttcgccttcgtttaagatggattttgtgaacagatccatgatctgctgtgcaccgcttgtgacgagcacgccgtcgtcctcggtgccgatgttgcgggaggacttcatgtattccttaagatgctgtaaaagcggcgggtagccctccgttgtgctgtactggagcgccaaaatcggctcttcctccatcagttttgcggaaatggcggcaagctgtttagacgggaacgcttccggcgcagggttgccggcggaaagcgaaatatagcttgggtcagcggcgtatttaaagatttcacggattgccgagggctttaacgtgagcacgcggtctgaaaatttgtattccatcgtaacgtcacctttctatatgattcatttgattttgcactttcaggcttttacgggtgtatctgaaaacaaaggaaacgcaggatatttcgcaaagacgcggcgggttcaaggcgaaaaccgcaggaagccttccggctgccgagaattttcaacgcagaaaccgtccgtatttgtggaatagacaagtttttgacttttcagatgcaccccaaaaagtaaaacctcttgcgcccttaaaacaagggacaagaggtcaaattcctgcggtaccacccaaattggcgcataaacgcccgctttacagccgtagttacggcttggcttctaacgcagccaaacgtcgggcgattttcccgcccgccctcatggagccattcgccgcgcagcccgcaccccgtctcaccgaaaggggctctctttgccgttttgcatcgggtactatttccaatcatcggttttgatattaccgctattctaagcccttttttgcggtttgtcaagtcggcacaaccggaaaactggaaatttccacgtgggaagcaagagaaaccgacaaggaaaatgcgcatgaaaggcgcggcgacagaaaccttgtgcttttcacaaaacaatcctaaaacccgcctgcctgtttcgtgttttcctgcgggcaaggcttcgtataatggtagcacagaaaagacaaagtgcaggaaagggcggaaaagacaatggaggaaaaagcagttttaagagtgcgggaccgcataggtgcggcccttaccgtgccgtatgtgcgcagggcggtgtggatgatggcgggcggtcttgcgggatttttaacggcgcgcgggctcgtcttcggcaaatacgcgccgtttgcggcggcaggcgcggcggcagcgccgttttcgaccatgtgggcggtcatcctcggcggcgcggtgggttacctgttcccgtcgcccgtggatatccccgcgcgctacatcgcggctttgctcgccgtgggggccatccgctggtcgctgtcggagttaaagtccatccgcgaccacccggtcttcgcaccggtcacagcgtttttgccgctgctttcgacgggcatcgccatggtgtttttaaacggctcgctttcaaatgtgctcgccatgtacattgcggagtcgtttttggcggcgggcacggcgtattttctgcgccgcaccgtgcagcttttggagacccaccgcgagactgccgtgtttgacagcggcgacgtggcggctgttatcgtctcgctcggcgttttgctgctctcgttttcaaacgtgaccgtctcgcacatttccgtcggtcgcgtgctcatcgtgctgacggtgctcgtctgtgcgcgcatcggtgggcttgcgggcggcgcggtggcgggcattgcggcgggcacagtgcaggggctctccacggcggggctttcgtatctctccggcgcgtacggcctcggcgggctgatggccggcgtgttctcgccgctcggcaaattcgccgtggcggtggcgttcgtcatttcaaacggcatcgcgtccttgcaggtgaacagcacttcgcaggcgttttacggcgcggtggaggtggccgcggcctccattttatacatgcttttgccgcagagccgacggctttccaatttatttaccgcgcacggggacaggctgccgggcgattctcttagaaaaaacgttattttacgcctgcggtatacggcggaagccatgcgcagcgcatcggattccgtagatcgcatctcggaaaagctggagacgaccgcggcggctgacctgccgcatgtgtacggccgcgcggcggagaaggtttgcaccgggtgcagccaatgcgcagtgtgctggcgcaaaaatcgcgacgagacgcaaaaaacgttctcgcggctttcgtatccgctgcgggagcgcggcaaaatcgaacgcagcgactttgatgtgccgtttttgacgcgctgcaaccgtgccatggagctgagagacgccgtaaacggcgaataccgcgagcttttggcaaaagaaagcgcccgtatgcgcgccgaacaggtgcgcgccatcgtcgaagaacatttccgctccacggcgcagatgctcggcgacatggcggaggaattcgagcagtaccagcgctttgatgaggacagtgcagagcaggtgcgcgaggttttgcgccaccgcgagctcacgccgattgaagtctgctgccgcatcgataaattcggccgcatgacgattgaagcaaacatttgccgcacacatggggtgcacatcaacaaagggcagctgacacgcgagatctccggcgcgtgcgggcgcacgttcactcagccgagcgtgacggcggcgggcgataccttaaagctgcaaatgtgccagaagcccgtttacgccgtgcagcgcggctttgcgcagcacgcagcaaacggcgcgtctctctgcggcgattgcgccgaggcattcacggacggcagcgggcggtatatctcggttttaagcgacggcatgggcacgggcggccgggcagctgtggacggcacaatgaccgcgggtatggcgcagtcgcttctcaaagccggtatcggatttgagagcacactgaagatgatcaactccgccatgctcgcaaagggcggggaggagtcgcttgcaacgctggatgttgcgtgcatcgacctctttacagggcacgtctccctgcgcaaggcgggtgctgcgggcacggtgctgcgcaggcgcaagaagacggagtatctggaagccaaaagcgtgcccgtgggcattctgccggaaatcgcctttgcccgcagcgagaaagacctcgatgcgggcgatatgctcgtcatggtctcggacggcgtgacggcttccggcacggagtggctgtgcgacctcattgcaaactatgaggacgacgacccgcaggcgctttccgagcgtattgtggagcgcgccgtaaaagaccgcgcagacgggcacgaggatgacgtaagcgccgttgtactcctgatcgaatgacgtacaattcaaaagttctccctgaaatctgtgtaagattaccattgaatagccttataaagtatggtatacttatacaagtttatgagatataatatcttaatatttgagcaatttatgcaaaagaagggagaaacccatgaataaaagagcaagcggtgtactgatgcacgtttcctccctgcccggtgcctacggcgtcggctgctttggtaaggaagcgaaagagttcattgactttttgagtgacaccggctgtacctattggcaggtgctgccgttcacgccgaccgacgcgtacaattcgccgtacgccagcatttcggcgtttgcgggcaaccgcaatttcatcgacctcgagcagctgcgcgacgagggcttactgacagacgacgagctgcgcgagcagatgtacgcaaacccgtattccgccgcgttcgattttctggagctgcgccgcattccggtcttataccgcgcatttacccgtgcggacgaagcctaccgcgataaggtgcgtgcgtttgccgaggaaaacaagagctggctgccggactacgcgctgtatatcatcttgaaagaagcgaatatcggcgcagagtggtatgactgggctgatgaagacctgaagcttcatcgccccgaagccgtcgcgaaagcgatggaggagcaagccgagaccgtgcttttcatggagttcatccagtacacgttcttcgagcagtggaagaagatcaaaaaatatgcaaacagcaaaggtgtggagatcatcggcgatctgccgatgtacgttgcgagaaacagcgccgacgtgtgggcaaaccgccatctgttcgacctgacagaggacggcgagccgaagaacgtggcgggcgtgccgccggattatttcagcgagttcggccagaagtggggcaacccgctttataactgggcagagatgaaaaaagacggctaccgttggtggatggatcgcctcggcgcgtgctttaagctgtttgacgccgtgcgcatcgaccacttccgcgctttttccgcctactgggccgtgcccgccgaagcggagaccgccaaagaagggcagtggctcgacggcccgaagacggatttcttcgacgccgtgaaccgcacgttcaaaaacccgaagatcattgccgaggacctcggcatcatcgacgacggtgtgatcgacctgctgaaaaaaacgcagctgccgtgtatgcgcgtgatgcagtttgcgtttatggaaggcaaggacaacatgcacatgccgcacaactacccgaaaaactgcgtggcctataccggcacacacgataacaacaccgtgctcggctggctgtgggaggcacagccgtatgagcgcgagcatgcactgaaatactgcgcattccccggcggcgactgggcggtaggcggcagcgcaagtgcttcttgccacgccattatccgcacgctgtggcagagccccgcgaatacggtcattgtgccggtgcaggacctctgcggcttcggcaaggacacaaaaatgaatgtgcccggcgtgccgaacggcaactgggcgttccgcgtcacgcaggagcagctcgacggcatcgacaaaaagtggctcaaagaattaaacgacgtctattacagaagcaaataacagcaaaagccggcgggtttccgtcggcttttgtcttgcaaatttccggtgtgctgatataatggggaaagagaaaaatctcttagagaaaagttccttttgggaggaaaatagtatgatcgatatgaaaaaagcattgcagaacattgacgacgtgattgaaaaggggccgtacaaagacacatgggcgtccctttcaagctggcagacgccgaagtggtatcaaaaggcgaagttcggcattttcatccactggggcgtgtacagcgtgccggcgtttgacagcgaatggtacccgcgcaacatgtacatagagggctccaaggtttacgagcaccatatcaaaacctacggtgcacacaaggatttcggctacaaagatttcattccgatgtttaaggcggaaaagtttgatccgaacgcatgggctgcgctttttaaaaaggcgggcgcaaagtacgttgtgccggtggcggagcaccatgacggcttccagatgtaccgctcaaatatttcgcactggaacgcttacgagatgggcccgaagcgcgatatagtcggcgagctgaaagcggccgtggaagcgcggggcatgacgctcggcgtatcctcgcaccgtattgagcactggttcttcatgagcaacggcaaaaagtttgagagcgatatgccgcaaaacccggaccgcgacgacctctattggccctccatgcccgacccggagaatttcgatgccatcgacggcaagccctctgaagaattcatggaagactggctcgtccgcacgtgcgaactcatcgacgattatcacccgaaaattctctattttgactggtggattcagcaggaggcggcaaagccgtaccttaaaaaagcggcggcgtactattataatcgcgccgtggaatggggcgaggaggttgccatcgattataaattcgacgcgtacatgttcggcacggcggtgccggatattgagcgcgggcaaatggcggacatcaagccgtatttctggcagaccgataccgccattgcgctgaattcctggtgctacacggaaaacaacgacttccgcccggcaggggacatcatctgcgaccttgtggatatcgtcagcaaaaacggtgcgctgcttttaaacgtaggcccgaaagcggacggcaccatctccgatgaggacaccgcggtgctgactgccatcggcgactggatgcaggtgaacggcgaagcaatttatgacacacacgtgtggaggacgttcggcgaaggacccacaaaggtgcaggacggcggcttttccgacggcgtgaaaaagaactttacgggcgaggatttccgctttacggcaaagggagatacgctctttgccatcgcgctgaaggcgaacgacaacggcgaataccacattcactccctgcgtatgcaggagcacaccgccggtacggtgtaccacggtttagtcgagagcgtttcggtgctcggcacagacgatgcacccgcgtggacgcgcgacgaaaacgggctgcatatcaagacgaactacacgtccgataagccgatcacattcaagattaaattaaactaaaatcacaaaacaaaaagcagagtgttcggattgagcactctgctttcgttattttatgcagttattcggagatatactcgcgtacgcggaacttggcgccggcgttttcgcacagcttgcggcaggcttcaatgtcctctgcgggcatggtgctgacgaccgtcatcaccacatgcggcacgttttttacggcttctgccgtaaaatgcagcatggcatcaaacgcctcggggccgtatttcgagtgacataccgcatcgtacttttcggcggtcggcgcgtttaagctgacggacacaatgtccaaaagcccgtgcatttccggcgcggcgttgcgcccggtgatgcagtccgcaaggccgttcgtgttgacgcgcagggtgtaattgcccatttcttttaagcgcgcggcaatccaaagcatgtcgtcccagcggcaggcaggctcgccgtagccgcagaagacaatctccgcgtatgaattgaggtcgcgttttttaaggtcggctaagatttcctcttttgtcggctccgcgccctcataccagaggttatccgcgtacaggctgcccgtgctgttgttgcgcaggcagaagtcgcatgcgttcgggcactggttcgtgacgttgatgtagaggttatcgccgtattcatacgtgatggtcaagatgatcgctccttttattttgcggtgctcggcagcgtgataccgaaaaggcggcaggcgttttcgcaggcggtttccaaaacctcctgcgccgtgatgccgcgcgcttcggcgatcttcgccgcgtcgtaggggatcatggagctgtcgcagcgcttgccgcggaatggcacgggcgccatgtagggcgcgtccgtttcggtcaaaaggcggtcgagcgggatggcctttgccacctccacgctgtggcgcgcgtttttaaacgtcacaacaccgccaaggccgatatacatgccgagctttacggtctcctgcgccaattccgcactaccggaaaagcagtgcacaacgcccttcggcttgtatttccgcagaatgtccatcatatcgccgtgggcctcgcggtcgtggatgacgacgggcaggtcgtgctttttcgcgagcttcagctgggcgataagcacctctttctgcttttcgcgcgggcactcgtcctcccagtggtagtcgaggccgatctcgccgacggcgacgatcttcgggtgggaaagcagcgcttccacgtccgaaagccagttatcgggcaggtcgtttgcgcactccgggtggatgccgactgcaccgtagatataatcgtatttttcacagagcgccacggtttttttgaggctttcataatcggctgccatattgatgaccgcaacgacgcccttttgcggcagtacggagccgagcagctcgtcacggtcgatgtcgaactgctcgctgtcgtaatgtgcgtgggaatcaaatatcatagagattttccttagcgaattttggagcctgccggggtgccgtccacaaatacgacgcgcacatcgtcctcgcctgcgtctgccgcaaggatcatgccctggctttccacgccgcagagcacggcgggcttcaggttcgcgacgacgatgacggtgtgaccgatgaggtcttccggcttataccacttcgcgatgccggacgcgactgtgcggggtgtggaggtgccgtcgtcgagcgtgagcttcaagagcttctttgcacgcttgatcggctcgcaggcaacgacctttgcggcgcgcagctcaacctttgcaaagtcttcaatattgatctgggcaagaccctcaatttccttcttcggctcttccttcggagcgtacttcgcttccacagcggcgatcttctcgcccatctccttcggatcgatacgggcgaagagaatctccggcttgtctgttactttacccccattcgggtaaacgccgaacgtatcgagcgtatcgtatgcgcgcaaggtcgtgccaagctgtgcgacaatcttctctgcggtgtccggcataaacggcatgaggagcgccgcaccgatcgtgatgctttccacaagattatagagaacggtggaaagtctgtcggctttcgcttcgtcctttgcaagcgcccacggcatcgtttcgtcaatgtacttattgcagcgcttgaagagcgtgaagatttcggaaatggcatctgccacgcgcagttgatccatcttcgtctgcacgctgttctttgtggcgagcacaacgctctttaagtcgctatcgacgtcttctacgacgtttttgttctctacaacgccgccgaagtacttgtttgtcatggaaatggtgcggtttacaaggttgccgagcgtgtttgcaaggtcggagttcgtgcgttcgatcatcagatcccacgtgatggtgccgtcggattcaaacggcatctcgtgcaggacgaaatagcgcaccgcgtctacgccgaagaggtctacaaggtcttctgcgtaaatgacgttgcccttcgatttgctcattttgccgccgttcatcagaagccacgggtgaccgaacacctgcttcggcagcggcaggtcgagcgccatgaggaaaatcggccagtagatggtgtggaaacggatgatgtccttgccgatgaggtgcaggtctgccggccaatcacgcttaaactgctcggtggagttgccgtcgcagtcgtagccgatgccggtgatgtagtttgtgagcgcgtcgagccaaacgtacacgacatgcttgtcgtcaaaatcgaccggaatgccccacttgaaggaggttctggaaacgcagagatcctgcaggccgggcagaaggaagttgttcatcatttccgttttgcgctgcggcggctgaatgaactccgggtgcttattgatgtagtcgatgaggcggtctgcatacttgctcatcttgaagaagtacgcttcttcctttgcgggcttgacctcgccgccgcagtccgggcacttgccgtcgacaagctgggactcggtgaagaaggactcacacggcgtgcagtacatgccctcgtagtggcccttataaatatcgccctgctcgtagagctttttaaagatcttttgtacctgcttttcgtggtaatcgtccgtggtgcggatgaatttatcgtaggaggtgttcatcacgtcccagttcgccttgacaatcttcgcgacgttgtcgacatattccttcggggtgatgccggcggcattggccttttcttcaatcttctggccgtgctcgtccgtgccggtctggaagtagacatcgtagccctccatgcgcttatagcgcgcaatgctgtcggcgagcacgatctcatacgtgttgccgatgtgcgggcggctggaggtgtaggcgatagccgtcgaaatataatacttcggtttactcatgggtggatcattcctttacaatgtattttcaaggggttaattttttctacggttgaatgtattcaactgaatagtacggcggaaagtgccgagaggatcatcagcccggccaaaatcgccgcgccgatgcgaacgatgagcttgcgttgcttttcggttttcatagaaagctcctttcgcgggtgcagggcatgcctgtacgtgtaccctttattttaccattctttttttcacctgtaaaccgctaattgactttattttccgccgcggttacaataaaagcggaaatacttttgaaatgagggaaaaacccgatgcagtttttaaatacagaagaaaaaccgcgccgcgcggcggtcatcaacgatctttccggcgcggggaaatgctcgcttacggtgatgctgccggtgctgtccgccttggggtgcgagacatccgtgctgccgacggcggtgctttccacacacggcggctttaaagatcccgtgtaccgcgatttgacggacgatatgctgaaaacggcacagcattggaagcgcgagggggccgagtttgagggcatctgctccgggtacctcagcagccgcgagcagattgacactgtgcgggaaatcttcgagctgtttacggacgaacacagccgtccgctgcgccttgtagaccccgtgatgggcgacaacggcacgctgtacggcatttttaataaagaaacggcgcagagcatgacgaggctttgcgaaaaagcggacattttaacgccgaacatgacagaggcgtattgccttttgcacgagccgtttaaggacgggccgtatgacgaaaaggagcttaaaagagtaatgaaagccctttccgactttgggccgaagatcgtcattctgacgggtgcgtatacggacgagaagaaaatcggcgcggcgtgctacgatagggaaaaagacgagacggcgctggtgctttccgaccgcgtgccgggcaaataccacggcacgggggatattttcgcggccgtgatgctgggggcgatgttaaacggcaaaacggtaaaggaagcctgtgccgccgccgtgcggtacaccgcaaagtgcatagaagaaacgagaaaagcatgcggtgacaacaccatttggggcgtgaaattcgagaaatgtctgccgtttttgatgcacgatgtgctcacggcgaacgacaaataaagtctttggacaagttttcttcagaaaacttgcgggttcttagggcagcgccctaagtcgctttccgcagaaagcgaaatcttattgcctaacaaaaaactaagaaggtaggctaaacagtccgggggactgtttagccgtaggaaacccggttgcataggttccctgaaagggcggctcaatgccgccctttttatatagctgtgagcatgcgttgatgcgcgttatctcttttttttcctcaatcagagggagtctgaaatgaaataaaaaccgccggacatcgcaggacatcagaggacattgcaggacatcggaggacatgaatttgaaaagtttcccttttgagggaaacttttctgcgttttgggggtatgggtgaagagacaaacagacgggcgaaaaaacgaacgccgtttggcgcttcaaaactttcagagaggatgtggaacatggtgaacgaaacggcgaaggagggttttcgcagattggcgttcggcggcattcacgatgccgtaaggctgctcttttgcgaggacgtgaacccgcgcacgctgaaaaacatggatctgttcgccgtctccgaaattcgcagaccgaaaaacggcggcatggaaattcggtttttcgaccggatcgaagcgctgcggctcctcagcgagctcgaaacgagcgggacgggtgcacaggcgctgctctccgccattgaaagcggtgcggcggcgctgaaagacggggataagccgtgacgccgttttccgaaaagcagatgcaggtcttgtgctggtggggcgaaaagagcccgcaccggaataagcttgccgtcatctgcgacggcgcggtgcgcagcggcaaaaccacctgtatggggatatccttttttctgtgggcgatggcacgctttcaaaatacgagctttgcggtgtgcggcaaaacgatccgttctgtgcggagaaatgtggtcgcggagcttataccaaagctaaagtctatgggcttttccatgcgcgtgcggcaggcagagaacgagattatcctatcgtatcagggcagagaaaaccgcttttaccttttcggaggacgagatgaatcgagcgcggcgctcattcagggcatgacgctcggcggcgttttgtttgacgaggtggcgctgatgccgcgctcttttgtggagcagggcattgcgcgctgttcgctgaaaaacgcgaagctgtggttcaactgcaacccggagcacccgcagcactggttttaccgcgagtggattttgaaagccgagagccgaaacgcgctttacctgcactttacgatggaggacaacccatcgctcagtgaagatgtgcgaaagcgctaccgaacgatgttttcgggtgcgttttacagccggtttattgagggcaagtggacggcggcgacgggactgatttacccgtttgcgcttgacctcctgtgtgaagtgccgaaagcggactttgagcggtacgcggtgtccatcgattacggcacggtaaacccgacctccatgggcctttgggggcttttgtgcggcgtgtggtaccgcgcagacgagtattactttgacgcgcggcttgaaaacacgcggcgcacggacgaagagcactttaagggttttttggagctcattcgcggcagaacgcccgatgtgattgtatgcgacccctcggcggcgagctttatcacacttttgcagagccgtggttttgcagtgacggcggcgaaaaacgacgttttaaacggcatccgcatgacggcaacggcgctgcgcacggggcagatcaaggtgacaaagggctgcgtggacgcggtgcgggagttttccctctaccgctgggcagacgacggcgcgcgggatgtgcctgtgaaggagaatgaccatgccatggacgacatccgctattttgtctccacggtgctcggtgcgggcgaaagctttgcctgcgcggtgcaaagggagacggggaaaggagttagcatttgggatttttgaaaaaggagaagcgcacggccgtttcggtgcagacgcagggcgggtacccgccggtgctgccggtgacggcaggcgagcgtgcactgtaccgtgccttgcgcgagcaggtgccgatcatcgacgcggcaatctacaagctggtgcgtcttatcggcgggtttgaggtgtattgccccgaaaagcacacggaaaacgcgctgcgcggttttttaaaaaccgtgcccgtaaacggctgcaacatgggcatcgataactttttgtcggtctattttgagcagcttttaacgtatggcaatgcaattggggagatcatactcgcaaacggggaaattcgggcgctgtataatgcgtcgctcgaagacctcgagattcggctcgtctcgccgcttgaaacgggcgtgttcgtcgtaagggacgggcgtgcggagccgtgccgctacccggagctcattttgacttcggcgttaaacccgatgccgggcagcgcggtgggaagctccattttaaagggcctgccgtttgtgagcgaggtgcttttgaaaatttaccgcaccgtcggcatcaactgggagcgtatgggcaatgtgcgctttgcggtgacgtgcaaaaacgagggctacatgaacgcgggtgaccgtgcggggcagcttgcaaaggagtggagccgtgcgatgcacggccacggcgtgagcgactttgtggcggtgggcgacgtgcagattaaagccatcggcgcggacgggcagcagatggacagcgaagtgcccgtgcggcagatgctggagcagattgtggcgaaaatgggcattccgccgtttttgctggggctttcgtggtcctcgacggagcgcatgtcgagccagcaggcggacatgctgacgagcgagctgacggcgtaccgcagaattttggagccggcggttttgaagatctgcaaaacgtggctgcggctaaatggtcttgacgacacggtggaaatcgattggaacgagatcacgatgcaggacgaagtcgatcacgcgaacgcggcgtatctcatggcgaagacggagcagcttttaaaggagggggaagcttgagcgaaacggtaacggcggtacagccggataaagcggcgatggagaagatcaacctttacacgcgccgcgcctataagccagaggaggtgtacacgttttcggtcgttttgtgcgacaacgaggtggatagagacggtgagtgctttacgaaagagacactcgaggagcttgcgaagctgtttgtcggcaagacgggcattttagaccacgagccgacgagcaaaaatcagacggcgcgcgtgtttgacgctgcggtgaaggaaattccgggcaaggtgacatctttaaacgagccgtatgcgcagctcactgcacaggcgtatgtgccgcgaaacgacgggacgaaggcgtttattgaatccattgaaagcggcatacgcaaggaagtcagcgtggggtgcgcagtgaaaaagcgcgtgtgctccgtgtgcggcgcggaaagctgcgtgcacgtgccggggaaaacatacaacggcaagcgctgtgtgcgtattttaagcggcgcggcggacgcatatgaattctcattcgtggcagtgcctgcacagcgcgcggcgggcgtggtgaagaaattttcgccgcgctttgaagaatcggagaagaaaaaggaggtcaaaacggtgtacgacattgtaaaaaagctcgcggacggcgaagacagcgtgacggtggcgaaggaggagctcaacatgctcaaaacggagctgaaagcgcttttcgaccgcgcggagtgcggcgaccgctaccgtgcggcgctgtgcgaacgcatctataagctgagcgccgtggcgcagccggagtttaaacgcggactgacggaggcgatcacaaagtcgctcggcattgcagaactggaagaaatggcggcggcgttcgcaaaggcggcggagcggaaaatgcccgtaatgccgcagctggcagcggaaaagacggaagacacgaacgcggcagacgacggcgcgttccgcatttaagaaaggggattatacgatggcatttgaaaatattacactcgaaaaaggcatgtacggcgtgccgggtaagaattttacacaggttttggaggagctggacggctcccagaactacgcgggcacaccgtttgcggggcttgacgcataccagagacagcttaaacgcttcggcattcgtgtgagcggtgcgaactgcgacaccgtggagaagtttttcacctcctcccagagcgcggcgctgttcccggaatacgtcgcccgcgcagtgcgccagggcatggagatggcgtcttccctgccggacatcgcggcgaccgtgacgaagatcgacacgctcgattaccgcaccgtgcagacggcgacggcttctggccagaagatcgaagaccccgtagcggagggcgcggccattccggagacggtcatcaagacggcgggctcgcttgtgacgctgcataagcgcggcagactgattgtcagctcctacgaagcgctgcgccaccacagactggacctctttacggtcattctgcgccagatcggtgcgtacattgcgcgcagacagatgaaggacgcagtggacgtgctgttaaacggcgacggcacgaatacgggcatcaccgtgacggcgcttaccgctgcgccgacctacaacgaccttgtgacgctgtggggcaagctttccgactataacttcaatacgatcctggccggaacgactgctttgcaggcgctccttaagatcacggagtttaaggacgcgcaggcgagcctcaacattaagggtgcgggcaagctcatcacgccgcttggcgcgacgctcatccatgtgccgtccatggacgcgaagaagatcattgcgctcgacaagaactgtgcgcttgagatggtgcaggcgggcgatgtactgaccgactacgacaagctcatcgaccgccagatggagcgcgcggccgtgagcgccgtggcgggctttgctcagatctacggcggcgccgcacagggccttagctactgattttattcgattctggcaagccgtaccgctttggtacggctttgccgaataaaaaaaggaggggcaaatggagatacgaaacgtgctggaacggctgaagcttttgacaaatgacgaccgcgaagacctgcttttgatgctgagcggcgatgcggcgcagcggctgaaagcgcgcctttgctgcactgaggcggaagaaaacgcgcatgaggaggcgctgtgtgcagcggctgcggcgcaggcggcgtatcagttttggcttttggaggaagcagcatcgccgaaaagcctgacggcgggcgaggtgcgcgcggaatttgacaaaggcagcgaaagggcgctcgcctatgcaaagcagtgcgagcgggcggtgtccgggcttttgcgtgacgaggatttttacttcggcgtggcggaggacacagtgtgagaaatgtatttttgagggcgcagcagatgacggcggagataagcggcgagaaggtcgtttgccgcggcgttgtgcatcgcctgaaggaagacaaaacggccttgcaggcggaaacggagacgttcggcggggcaatgaagccgttgtatgtctacttcggcgacggcaaagtgctttgcggcgcggagaacgcgaggctgactgtgggcggcgagacgttccgtgttttatatgccgaggaaaaaagcgggctttgcggggcgctttacgtgcgcgcggtgctggaaaaggaggaaaaagatgacgggaacggagcttagtgcggcgcttgcggaaaagctgaaagtgcttttgccggactgcgcggtgcgtccggcgtttacgggcacgctgcaaaggcttccgcagcgtgccgcggtgacggtgggcgtgatgcaggaggaaaacgcggacggtgtgtttgaaacggtgctcggcgtgcagctgtatgcgcgcgaaagggacgaccacacgcggctgtttgacgcggtgtgtgcggcggtatcgtctttgccgtgtgcgctgcgcagtgtgaagcggagcgagacgacgtactcggcggcgctcagttgccttgtgacgctttgcacggtgcaggcggcgacgggtgcggcggataacgcacgcgcggcggtggtaatcggcgacaaggtatttacggcggacgcggtgaaggtttcgcacgaagcgaaggtcaagcgctattacgccatcggcgaggaaaatccgtatgcggcggtggcgggcaaagcggtgtacacgattgtgctgcacgggttttcgggcggcgaggaggcgcttcccggcgaattcacactgcaaacaggcggcgcgcggtacacgcactgcgttttgaaagcggcgagcgaaaataagcttgtgatagaagcgggtgcgtgtgaaaaaatcacacagcgaacacaaagcggaacggaggcataaggtggaagaagaaaacaaaaacgcacaggcgctctccggcattttggagcgcgaggagcggcgatatcccgcgctgcttcgtgcggacaggaggtttgcatgaacctgatgacaatgcagtttggcagctttgtgtttccggtgaacccgacggaattaaaactcgagcgggcgtgcctgctgcgtgagacggtgggtgttgacggcgaagaacgtgtggaggcggtcggcaagcgcaaggcgcgcgtagcgggcacggggcacttcaccggggagaatgcgatggcggtttaccgcgagttagaggcgcttttcggtgaaacagatacgctgtacttgccggggtacaggccgtttgaggcggttttgagcgagcttgcgctcatcggcgtgccggagaaaaacacggtgccgtacacattcgcctttgtggagacggcggggaaaagcgaagcggtctccggccggacataccgcgcgaaggcgggcgagagcctgtgggattacgcatattttacgggcgtttcgattgaccgcttggcggagaataaccggcatatcgcgtgtattgcggcgctgaaagacggcgaggaggtgcatgttccgtgacggatttttcgcttgagtttgtgtttgcaagcggtgaaaaacattcgtcgaaagaggagctgaacgaatggcttttaagaagcgacgcggacacggtggcggacagcctgacggtgcggtttagtgtgggaaagcgaatttttacggaagagcccgtgggggcggtgcttaaaaaggacggcgcggtgatctttgacggtatcgtggacgaacaccgcgtgaaatgccagaacggcgcgcgcacggaggtcttcttcctgcgcagccgcgcggcgcttttgctcgacaacgaggcggcaccgatggagcttagattgccctcgctgcggcttttggagcggatgtatctgatgccgctggggctgcacgccgtgggcggcgacaggcggccggtggagggcgttttgaccgtagaaaagggcgtgagctgttttgaagcgctgcaaacgttctctgaaagatatctaaactgtacgccgtatacggacaaaagcggcggcgtgcactttgaaagctacgtgccgaaaacggtgaagcccgactgggtgacggcgcgggaggtgattttttgcccgtacaaaatgctgagcggcgttacggtgcaaaacgcgcagacgggcgcatacagcgcggaatatcacgatcctttggccccacaggtgcgcgtgcggtatctttccgcctatgcgaaaacagcaccgacggcgcttttaaatgaaagccgcagggcggcaaagcgactaaagctgacgtgtgcttcttatatagacgggaacatgggggacacgatgcggacggaggagcttggcgaggtgcggctcatctccaaaaacgttttgctgcgcgggaaagacgtgaagaccgagctgcattttgaaccggtttaaaggaggcatgaacatgtggctgacgaaaaaggagacggcggaaaaggccgaaagcgtgaaaacaggcgttgtgacgacgggcggcggggagatttccgtctgcacggagctggagcgccgtgcaccgactgtaacggtgccgtacggcatggcggtgagcgtgccgcagggtacggaggctgtgatgaccggcggtgtgtgccttggtgttgtgaacgacgcgggaacgcttttacccggcgaggtgcggctgttctcagcgggcggtgcggagatcgttttgaagctcgacggcacggtcgtcatcaatgggcaggtgtttgagaaaaaggaggaatagcgtggaggtcgtgattttaaacggcataacgcagacggcggcgacagggctaccgaagacggccgaggggcaggacgcgcttttgcagcgcgcgtataaccgcatttgcctaaaacgcggcgcgttttgctatgaccgcgtgctcggcagccggttttatatgctggatgcagcagacgagcacgccgaggaacgggcgctgcggtatgcgcaggcggcgctgttacccttagccggtgttgaggcggtttccgtgcggcgcgagagggagcggtttatcttcggacttcggacaatgctcggcacgggggagattgcggtgaaaggggcgaaagtgtgaaatttgaggaaatttatgcgcacatggcggcggaatacaaaacgctggcgggcgtggagcccgaggacgcggcggacgtttcgatccgtctgaaggtactggcgggcgagttgtatacggtgctgtgcgcggcggaatcgctgaagctgaattgctttccgcagacggcggcgggcgaggcgcttgacctgcacgccgaagagcgcgggcttgtgcgcaaggacgcggtgaaatctgtgggcacgctgacgttttcgcgccgaacggcgctgagctacgcggcggagatccccgcgggcacggtgtgtgcggcaagcggcgaaaacgcggtggaatatgagacgacggaggcggctgtgctgcccgcaggcgcactgacggtgacagcggcggcgcaggcggttttgggcggcaggcgcggcaacgcggcaaagggtgcggtgaacacgctcatcacgccgccagcgggcattgaaagcgtgacgaacgatgtaccgtttacgggtggcgcggataaagaggacgacgaagcactgcgcacgcgccttttgcggtgcttttacgcactgccgaacggctcgaacacggagacgtaccgccgtgcggcgctgatgacaccgggcgtgaaaagcgttcaggtggtgccgcgcgcaaacggtgtgaacacggtggcggtgtatctgtacggcgacaacggcgcggtgacggacgaggtgctcggaaaagtcggagagacgctcgaaaagctcaaggagatcagtgtggacgtgacggtggttgcagcggtggctgtgaaaaagccggtgacagtttacgtgaagccgaaggacgggtgcgcgtttgaagatgcaaaagcatcgtgcacggcggcaatcacggcgtacctgaatgcgtttgaggtgggcgagccgtttgtgacggcggggctaatccatgcggtgatggagacgggcgtagcacaaaactgcacggtgccggcgagcgtggcggactttacgccgaacgccggggagatcatcacggcgggcgctgtaaatgtgctggagacgcagtaaggagggcaaatgacggaactggaaacccgcatgcgcgcgatgctcgaaaaaacggggctgtattttggcgaagacaagtggctttcggcagagcttgcggcgtatgcaaaggggcttgaactcgtgtatgatacgctttctcatgtgcggcgcgacgcgtttgtgcagacggcggaggaggacgggctgaaagcgtttgaatcgctgttccgcgtggtgccatccgtggacagcacgaaaaaccggcgcgcgatgctgctgacccgcggcgcggtgacccccgcagaccacacagtggaagcgatgcaaaagcagcttttggcggcaggcatcaacgggaagctcgtcccgcaaaagggcggcgtgctgaacataaatgtgctctctaccatgggcatttccgaagcggcggcggaaagcgaagcgcgcgcgtttttgcctgcgcacctcagtttggtgttcgatttcggcaaaaacacgtgggacgcacaggacgcggcggggagctcgtggaatgtgctcgaccttcgaaacaagacttggaacgcgctcgacgttttatgagcggaaaggagaaacatggcagcaagtaaaaaatcaacggttctcggcctttgcctttgggaggggacggacaagccgcgccgtgtggattttgtggcggacaacgaagccatagagtcgcagcttggcgggcacattcaaaacgataacctgcatttaaatgacacgcgcagaaagcgtttagatatgccgacggaggtgcgcacgtacacaggcacgggtgcggtctcgcgcacgatcttattcggcttcagtccgagtgcggtgatcgtttttgcagtgggcaagccgttttcgcaggcgacgacgggctgcacaaagcaatacgccggcatagcggcaggcggccagaacagccttggcgtgacgctttccacggcgcaggtgacggtgcggcagacccaaaccgccccgacggacggcagcggcatggcatcgctgaacgaaagcggcgtaacgtacgcggtgctggcgttcagataaggcgttatatcattttccgcgaggaaaatatcatatcgaacaaagagagatatatcattaaaaaagaagcgcgcagcttttggaggactgcgcgcttcttggtgtattgtgtgcaattttcagggatttctaaaggcggtcgcaggccgctttttagggaacccatgcaaccgggttccctacgattcaatagtccaccggactattgaatctaccttcctggtttttggggaggcaaaggggtttcacccttggaaccggacaagtttttgaaaaagcttgagcaaaactttatttgttcgcttgccgcaggcaggtgttagccttgcgtttcgcctttatcttcgagcagggtgacggtgacggtgaattcttcgccgcctacgccgctctcattcgggcggaacaggtggatctcggcggtatcgccgggcttataatttaaaagtgcgtttgcgagctcttcaagcgatttcgtttcggtatcatcgatggcggtgatgatgtcatacgcctgcacatctgtgccgttaaagcagctgtcttcgtcaatctcgctgatcatgaagccctgcgggacgtcatacatggcggcctgcatctgggtgatggcggtgcctttgatgccgaagcggacgcggccttgcacataaccgcctgcaagcaggtcgtctatgatgctctttgcgccggtgatcgggatggcgaagcccatgccctcgtactgctcggagacaatttttgcggagctgatgccgatgacctgaccgtgtaagttgacgagcgggccgccggaattgccgggattgatggcggcgtcggtttggatatacgtcatgccgttcgagctgtacgagccgacagaacggttaagacccgagatgacgccgcgcgtgatggagccggagaactgctcgccgcccgggttgccgatggcgacgacccactggcccatgcgcaggtcatcgctgtcgccgaactcggcgggcatgtagcctgtgccgtcgattttgagcacggcgaggtcggtggttttgtcgaacccgacgacgacggcgtcgtgaagttcaccgtcatacgttttgacctgcacggaaacggacttggaatttaaaatgacatggctgttcgtgatgatgtagccgtcttccgttgcgaaaatgccggtgcctgtgccctgcgtttcgccgctctgcgtgatgacgagcacggtggacgggatgaccttatcgtacacggcatcgatatcgaattcggcggtattcggttctttatttaagatgatgccctccgtattcggggtgacggtgatgtccggcggtgtgaagctttcgtccgtatcgggcgtttcgtcttcgccgggcgtttcgctgtcgctgccgtcattttcatgcgggaagttcgggatgagctgattgtccggcagcgttgtgacgccgtaatcgcggtttacggcggcgtagatgccgtaggaagcaaagccgatgacggagcccgcgacgaggacggacatgacgatgatgaggatgcgcaacccgagcggcattctccttttttgcggcgcgggatgcggatacggattttgcatattctgcgggtacggcgggggataagcaccttgtccgtagggcggcgggtactgccccggctgcggctgggtgttgtagtttgcatagccatacggcgggtttccgtactgcggggcgtttggctgcgtgttgtacgggtagggctgatacggcggctgcgggggataatagccggtatgctgaacgggctgcggctgcggcggaatgttcacgttcgggatgggctgggcttccggcgcctgctcggcattcgggagcggctctgccgtgggggcatcggaaacggtcggttccggggtgacagtcggttctgcgggagcggccggttcgttgaaaacggtgggctctgcgggaacggtctccgcggtttccggtgtttcggggatattgtcttcggaagaagcagactcctgcatttccgggattttgttttcaaaatcgtccatggtgtgatacctcacttttggatttatttctgatcgggctctttattgtccttgtggccgtggtgctcctttttggggcgctccgagatgacggcatcttcgaccggcacggtgaccgggatggagccggtattgtactttaacttcgggacttcctgcggcttcggaatatagaacgagaagcgggtgtactcgttcaagacggaggagacggaaatgtcgccgccgtggagcttgatgatggtgcggacaaggtacaggccgagacccataccgtttttatcctggcttctcgatttatcggtcttataaaacttctcgaacacgagggggagctcatcggactggatgccggagccgctgttttcgatggtgacgacgatgcggtcgatgctgtccgagacgttgaaggagatgtagccctcggtgtttgtaaacttgacggcgttttcgacaaggttatagacgacctgatgcaaaaggtcttcatcgccgtgcacctgcatgggctgcaaggtatcgagcccgcggatgtcgattttcttttcgtcgatgctcttttcaaacgtgagcacggtggagaggacggtctcggaaatatcgaaatcgtttgggcggagcttcagctcgccgttatcgatgcgggagagatttaacatggtacggacaagacgcgagaggcgcttgacctcgtcggagacgatgtgcaggtaatgcgactggcgctccggcggaatggtgccgtccagaatgccgtcgatgaagcccgcgatggttgtcatcggggtctttagctcgtgcgagacgttcgcgacgaagctgcggttcatgctttcgctgccggagagcgaatctgccatgttgttgaacgcggtggcaagctggccaatctcatcgttgcttgtgacgggcacgcggatggagaaatcgccgtcgccgaagcttttggctgcggcggacatctgccgcaggggcttgacgagccggtaggagaagaggccgacgacaacgaacgccagaatgaacgcggcggctgcggcgatgaggaacatttgcagtgcggcgaactgatactccgtgagggaggcagcgttcatggcggcaaaaacggcaccgacgggcactctggtgctgttttcgcctcctgcctcggaagatgatgtttcggcggcggaataaagcggcacgccgacgacgtagtacggggtatcgtaaatgccgtttttgcgtccgtcaccggtataggagccctcggacgcgcactttacgatgtctgccgaaatcttcgtctgcggggtgaagtttgcgccgatatttgaggtgctgttggcataggcgccgaacaggatgttgccctcgagatcggtgacgaaaatatcggcatcgatattgagagagaatgtgcgcacaaagattttcagaagctccggtgcaccgttattcgtgatgtctacggaagaagtaatggacgccatggacgaggcgttttgcataagcagtttgcgcttatcgcttttggtgtactgcgagaacacaaacatcatgacgctgccgagcacgatgaagctggcgagcacgatgaccatggtgacgcgcaggtattttccgaacagggatttttgcaaggggaatccttcctttcgcccggcttattctttcacttcaaatttatagccgacaccccagacggttttaagcgaccatttatcggaaacgccttcgagtttttcgcgcaggcgcttaacgtgcacgtctacggtgcgggaatcgccgtaataatcaaagccccacacttcgtcgaggagctggtcacgcgtgaagacgcggttcgggttcgaggcgagatgatagatgagctccatttccttcggcggagtgtcaatctggacgcccttgaccttgagttcgtaatttgtgagattgatggagagattctcgtagtgaacttctttcacctgagaggattcttttttgccaatgcggcggaggacggcgttgatgcgcgcgatgacctcttttgtctcgaagggctttacgacgtaatcgtccgcgccgagctctaagccgaggactttatcgaacacttcgcccttggccgtcagcataatgatggggcactgggactttttgcggatctcgcggcagacctgccagccgtcgagctccgggagcatgatgtcgagcagcatgaggtccgggttgacggaatcaaacatttgcacggccgccttgccgtcgtttgcaatggctgtttcaaagccttccttttcaatatacaatcttaaaagctcacagatatttctatcgtcgtctacgatcatgattttgccggatgccataaatttctaccttccttatttcaatattgcggggcgaaaagcgaacccgtttcctcccggaaatcccctgtttgtgcagagtatgaccagtttgtatttattgtaccgatttattgcgtcgaatgcaagaacaaaaggtgaatattctgtgacgatagggcttgttttggggcgcggaattggtgaaaatgcgcgtttttatgcgaagtgttgcggcggaaaataaagtgtgttatactatatcagttcgattttagactgtgaacaggataacgttcggacaaaatgaaaactaaaggctttaaacagcgtacttcgccgtgcttgcggcgaagtcttttcatgcgaaaaactgcgtttggagcgtagagatttgcaaaagaatttacaaaaaagaaaggaagtttgattttatggcggaaaaaacggtaaagcttgaggacccggcaaacaaccgcatgggctctgcgaagatgctgccgctgattttgacgatggcactgccggcaatgttctcgatgctgattcaggcgctttacaacattgtggacagctactttgtggcgcaggtgagccagaacgcgctgacggcggtctcgctggcgttcccgattcagaacctgttggtggcattcggcgtgggcaccggcgtgggcgtgagctcactcatttcccgcagactcggcgagcgcgaccaggaggcggcggacaacgcggcgacgcacggcattattctttccgcaatcacgtatgtggtctttgcagttttcggtgcgattgtggcgcgtccgtttacggcgctttacacgcaggacgcggaagtgctcagcatgggcacgacgtacatcacgattgtgacggtggcatcgttcggcttcttctttgcggcggtcattgaaaaaatgttacaggcgacgggcaacatggtgatgccgatggtcattcagcttgtgggcgcggtggcaaacatcatctttgacccgatcctcattttcaacttcaatatgggcgtggccggtgcggcgtatgcgacggttggcggacagattctttcgatgattgtgggcctttgcattttgtttttcggcaaccacgcgattgcgctggaatttaagggcttccgtttccacggcaagacgatgaaggacatttacgttgtgggtctgccgagcatcgtgatgaacgccatcggcacgctgatgaccatggcaatgaacggcattttggcaggcttttccgcagtggccgtgaatgtgttcggtgtttactttaaattgcagtcctttgtgtttatgccggtgttcggcttgacgcaggggctcatgccgattatgggctacaactacggtgcgcgcaacaaaaagcgtgtgacgggtgcggtgaagatcggttgcgtgattgcgcttattattgagattgcgggtcttatcgtgttggaaatctgcccgggcgcgctgatttccatctttaacgcgacgccggagctgcacgagatcggcgacccggcacttagaatcatcgcgatccacttcccgatggcggcgatcggcattacgctttcgacgttgtatcaggcgacgggccacggcatgtacagccttgtgcagtctgtgatgcgccagctggttgtgctggtgccggtggcgtggctgctctcgaaaatcggcctcggcgctgtgtggttctgcttcccaatctccgaatttatttcgctcattgtgacggttacattctttgtaattctctacaacaaggaaattaagaacctcgataagccggtgaacagtgcggcggcgacggagtcggtgaaggggtaagtgaactgaaatagagcgggcaaataaagttttcgacgacctttttcaaaaggtcgtggattccaaaggcaaggcctttggtcgagctccgcagagctcgaaatacttttgccaaacgcaagatcaggaaaatagaagaaccgtccgggggacggttcttcgtaagaaaccctatcaagggggttcttgaagggcggctttgtgccgccctttttatatatgctgtggtttacgttagataaagaaccaaccgggtagccattctaaagcgttggcgtagttctgcgtggtgagggtgccggtgagcacggggtagaacgcgatgaacataagaatgtgcacgaggacgcagctaagcaggagcattctgccgactgtgagcgtgacggcgccttttgtgaagacgacgcggcgcagggaagctgtttcttcaaggcgctgatacgcgatgaggagcgcgatgagaataaacggcacggcagtgaaatagtggtaaatgaacgtgcagcgcggcacgagtacccacggcagatacgcggacaagaagccgatgacacagatgagcgcggtgcgggagtgccgttttacggctcttacgaacgcgtacacggtggcgggcacgcacgcccagaagaacagcgggttgccaagcaccgaaatggtgcggatgtgcccctcgctgtcggcgctgtaattgccgtagtaccacacgttgcggatgtcgaacggccactgataccacggggactcaaacggatgggtcgcctgcagcgtggagtggtaattatacatatgcgtttggtacgcgatgaaccggccgaaaacatcgtagcggttatgcggcaatgtggtgagcggcaggaacgccgtaaagtagatgccgaacggaatggcgatgaacagcaggcagcaccagaggcagagctttatggatttattaaggagcgctttctgcacggcggcgtggcctttctcttcgcggtaagagacgatgagcttgccgaagaacagcacggcgaggccgactgcgccataggcgaccgtccacttgcttgcgatgccgagccccatgaagatgccgcttaaaagcagcgggggcaggagctttttgaagctgtcggtttttaaatcgtgctgaataaacacgagcatggcgtcgtacattaaaatgatgaagaacacggcgtaggtatcgatggtcgcgatgcgtgtttggacgtagtgcatgaaatcgaacgcaaagaggacggtaccggcggtgcagaggaacgtggagccaaagaggcgctttaagaaatggtagagcacagggagcatcagaacaccgaacagcgtgcccatgaagcgccagccgaacgggttcatgccgaagatgcgaatgccgaccgagatgatgagcttgccgagcgtggggtgtgtgttttcgtatggctcgagtcccaaaatgtgctcgtaggcggtgcgggcgtggtaaatttcatcaaagtacgtggagttcatgtagcttggatagagcgggacggtgttttgctcatccgtgagctgccaagcgttgccggagacggcagtgagcgttgcaaagccggtgccgtctgtctttttgagcgcgaactcgttgatggcgaggtcgtcgcacatcgatgtgatgcggatatatttgccgacagcggcgacggagacgtttttccacgcatagacgctgccgtccgtgttttcggcggcggtcgtccagttggtttgatcgtttgaaacctcgatcttcatattggtgccgacgcgctggccgatgccgttatccgcgggggcgatgccgggcaggtagaaaatttcgctgtacgcgtcgtcggtctcaaagacggcggattcgccgttttggggcgtccatgtggtattggcggtctcgtgatcaccgagattcgtgaacgcgacgatgccgtaaacgagggtgacgacggcgatgcagagaagatcgacatgcgtcaggcggacgttatgattcttgtcggtgatgagggaggattcgggcgctgcggcgggctttgtgtgctgttcggccgaggcggctttctgcgttttaaacgcagggagcgggcgcagggctttttcggaaataaagcagcggtacgtggtatagagcatataaatgtacaggagcacgtgcagcgcggagaggaacaggatttgaatggacgtgggggaaatgtaggcgttattgaggtacaacacataggcaacgttcaaaaaatgcaccgtggatgtgcccgcgaacaggagcagaaagcgcttttcctttgtgaaaacgtaggtgagcagcaggcacaggagcacggggaacagataacgctcgtgcattttgacgcagaaaatgtagaccgtgaacatcaaaacggtggggcaggcgaaaacggcgtcgtcgcgcttcgatttcagcagtaagaggcctgcgaggacggttgcgagcggcacgccgaattgcagccaagtgctgtgctccggcagggcagcccagttgagcccgaagagtgcccagacgttataggcgttgatggtgtagtaattataataatcgatggtgccggtgtagatttcgatgagctttaggtaatcgaaattctttataaacggcgtggagaacaggagaatcgtcgcaagggcgatgatgggcccgaggacgaggtttttccagtcctttttgcggatgacccagaaaatgagcaccggcgcgaaaatgagcatctgcggcttacttaagacgccgaagccgtagacgaacgcggcgagcggcgtgtggttgtaccagagaagcagcagggtgcagaggagcagaagcgcacagaagctatcggcctgaccccagacggaggaattgacgatgacggcggggcagaaaagataggcaaacgcgataaggagtgcgcttttttcaccgagctttttgcgggcgagcacccaaagtgccgcggcgcaggcgacgtccgacaaaatgggcgcgagctttatcatgagcgtatagctctgcgtgtattgatcgacaccgaacaggcggcggaacgcctcgatgatgtagagcacgtagagatagccggggggataatcgaggaagaagtcccggtaatacatattattaaagtcgtaatcgtgcgtataggcggcccaagctttaaagcaggagatgtcggcctcgaacccgttgatgttgtagcccagaataaagcgcaggataagccccaaagcgagcacggcgcagaagacgggcacggggggcaggccgaagaccgtagcttcctttatacgggcgcggcggacgggggcaccctccgtttccggcacggcgcgaaagccgagccacagcaccgccgcaaggaacagggcggcgagcagaatttgtatcgtcatggtttttgttcctttctcaaaatttatttggttacgggcttgacccgcacctttttttcatgtaatcttgtaatagaggggatgcggaaaaatccccatctgtgtacgctcattatagcataggttctaaatcgcttcaactgaattttggtgtgtttcaacacacgcgtgaaaaacgttttcacgcaggaaaggaacggtattgataatggaatttcagaaaatgcacgaaaatccggacgtgctgcacgtgggtacctgccagaaccgcagctacttcttgccgaaggcaccggaggacggggaagaatccacaagagtgtgtcttttgaacggcacatggtcgtttcggtattttgactcgtttttagacgtgttcccggagggctccgagggtgagatttgctttgacgaggaagatatggacgagattgaggtgccgtcctgctggcagaacgcgggctatgaccgccaccagtacacgaacgtgcgctatccgttcccgtatgacccgccgtatgtgccggacgagaacccctgcggcctttatctgcgccgcttctgcatgaacgcggaagacctgacgcagaaaatttatttgaactttgagggcgtggactcctgcttctatctgtggatcaacgagcagtttgcagggtacagccaggtttcgcattcgacaagcgagtttgacatcaccgatttactgaacgagggtgaaaactccgtggcggtgctggttgtaaagtggtgtgacggctcgtacctggaagatcaggataagctgcgcatgagcggtattttccgtgacgtgtacctcatccgcagacctttggcgcacatccgcgattactttgtaaagacgacggtgagcgatgacctttcccatgcggatatccgcgtggagatggactttatcgggctgccggacgtgacggcggagctgtatgacgccgagggcgctctgctcgaaagcacggcgggcgcggagccgaactttgcgctcgaaaacccgcacctttggaatgccgaggacccgtatcagtacacgatcgtgttccgcacggcggatgaagtgattgagcagaaggtgggcatctccaaaattgagatccgcgacagcgttctgtatttcaacaatgtgaaaatcaaattgcgcggcgtgaaccgccacgacagcgacccggtgacgggctacaccatcagccgcgagcaggcgaagcgcgacctgttcctgatgaagcaacacaacatcaacgcggtgcgcacgagccattacccgaacgcgccgtggttcttacagctttgcagcgaatacggcttctatgttattgccgaggcggacattgagggccacggtgcggcggcgcagaccggcggctacggcatggacgaatatgcggacaacgcactgaacccgattttcgacaaggcgattatggacagaattcagcgcagcgtcatccgcgacaagaataacgcgtgcgtgctgatgtggtcttacggcaatgagaccggctggggcccgagctttgagaaggccggcgcatgggtgcgcgaatatgacccgtcccgcttgacgcactacgagaatacgtattacgatgcgcgcggccacaagaacgacctgtcttccctgacgacggagagccgcatgtactcggcgccggagtggattgatgaatatatggtcgacccgaagtacacgaagcccttggtgctttgcgagtacatccacgcgatgggtaacggccccggagatgcggagcagtaccagcagctgatcatgaagtatgaccgctttatgggcggctttgtttgggaatggtgcgaccacgccgtttacggcggcacgacgcccgacaaccgcgatattttccgctacggcggtgactttggcgaatatccgcacgacggcaacttctgtatggacggccttgtgtaccccgaccgtacaccgcatacgggtttactcgaatataaaaacgtcattcgcccggtacgcgcggcgcttgtgaaccgcgaaacggggaaaatccagctgacgaattaccgcgattttacgaatacggaagaatttttgacgctttcttgggaaattcagcaggacggcgatacggtggcctgcggcgtgatggacgacatcaagattgccccgcacgaaagcggtgttattacgctgccggatgcaattccgacggagggcgacgtggcggtgcttttgcagtacagcgcgaagaagaacgacagcgtgttctttgagaagggacacccgctcggctttgaccagctgatcgtttcccgcggggcacgcaaggaagaagcgcttagcaagggctttgttgttgcggtggaggacagccgcgccgtgacggtgacgggcgacagcttccgctatgtgttctcgaagaccgagggcgtgtttacatctatggtgaagaacaatgtgaacatcatgacccgcccgatgacgtggaacgtgtggcgtgcaccgacggacaacgaccagtttgtgcgcaaggaatgggagcaggccggctacaacgaacccgcgataaaagtctatgtctgcaacgcgaaagaggaagacggcgttgttgtgatcgattgcaagctgagccttgcggcggtgtaccgcagaccgttcctgcaccttgactgccgctttacggtggacgccgagggcaaggtaagagcggagatcaacggtaagcgcgacatggagcgtccgttcctgccgagattcggccttagaatgttcctgccgaagtcgtttgacacggcggaatattacggctacggcccatatgaatcgtactgcgacaagcaccatgcgtcttcgctgggtcactttgcgcagacggcggacgacctttttgaggactacgtgaagccgcaggagaacggcagccacttcggctgtgcgcgggtgacgatcacggacggcgcgggcgctgtgaccatgacgagcccggaggacttctcgttcaacctttcgcactacacgcaggaggaaatgacggagaagatgcacaattacgagcttacggaaagccccgacaatgtgttctgctttgactgcaagatgagcggcgtaggctccaacagctgcggtccgcgccttgcgaaggcgatgcagtttgacgacgagacgttcacgtttaagtttgacctgaccgtggaataaaacgggcaaaatttgataaatcagagccgccgtgtgggagtttttccgcacggcggtttttctgtgtagttgcgtgcaaacagcccagtggactgtttgcacgtgggagacccaattagggggtctcccgaaaggcggcaatgccgcctttttatgctggactgaagggaaaagtacgaatgagaggcaaagactaaaaatacaaaaatgcaggggttatgcggataaatctgtgtaaaattattgacaaaaagacttgaatacagtatactttagctaaataaaggagttgagcccgatggttttaatataagcgattccggtacaatgaggaagggagaatttgctatgaaaagaaccgttgtaattttacttgttttactgatgggattgctgaccgcgtgtgctgtgccgccgaaaacggaggcgaacgtgactgacccggatgccatgaatgctaccgcagtgcgtcagacagaagcgtacaccaagactgattgggcgcagggcttgacggaacagcaggaagtcgagacagagatcgaaaaagctgtgagcgcagatacgcttgaccgtttgcagcaggatgctgtgaagctgcttgaagagtacgaaacggcgaagctggacggcacggaagaggaagccgcaaagctgaacgaagcgtatgagcgtatgcttgcggaaatcaatgcgatgctcggctgaaagtgaagaaacggaatgtttgccgctgcatggcttttgggctgtgcggcggcgtttttccttaaaattttcgtattttccggtgcttttgcaaaatatcttgaaaataagtccgtacaaattttgcgaaaggtattgcaaaaagttgtacggctttttataataaggttgtattgaacctgtgcaaacaggtatcctttttgaaaggaacgatgacatggcagacacagaaaagaaaactgcgaaatatcgctttctggtggataccatcaaggagaagatcaaaaacggcgaatatgagcccggcgaacgcatggaatctgaaaacacgctttccgagcagttcggatacagccgccaaaccgtgcgacaggcgctttccgtcctcgagcaggaggggctcattgagcgcagacgcggcagcggtacgtatatcagctccgagagccgacgcacgccgcgcggcaacagcatcgccattgtgacgacgtatatttccgactatatttttccgacgatcatccgcggcattgaggagacgctgacgaacgcgggctatgatttgaccctgaatgtgacgaacaaccacgtggaggaggaagcgcgcattttgcagtcgctcatttcccgccgcgtggacggagtgattgtggagggcacgaagacggcgttcccgaacccgaacgtggagctttaccgcaggtttgaaaaaatgggcgtgccggtggtgtttttcaacagctattaccgcgatttacccgattccgtttacgtagtaacggacgaccgcaaggccggcttgcaggcggtggacctcttgattgaaaagggatgcagacgtatcggcggcgtgtttaaatctgacgacatgcagggccacgggcgctacgcgggcttttccgaggggcttatccacaacggatgcgtccttggcgacgacaatgtggtttggtacacgacggccgagcgcagcaggctttttcgccccgacaacagcgactacatgtttgagcgcctgcgcgggtgtgacggcattgtgtgctacaacgaccagattgcgtatggggtgattgacctcttacagaagcacaatgtgcgcgtgcccgaggatgtgctcgtcatcgggtttgacgactcgagcatttcggaatactcgccggtgaagattacttcttttgtgcacccgaaggtggagatgggcagagccgcggcgaataagctcatccacatgctgcgcagcagcgacccggagcagccgcttgtgctcgatatgccgctgcacgagaaagaatcgacaagacgataaattttgatataaaacagtttgaaaggaacgaatgaatatgaagattgagaaattatccccggcatttaaggattatctgtggggcggcacaaagctgcgcgacgtttacggcaaaaagtgcgactatgaaaaggttgcggagagctgggagctttctacgcacctggcgggccagagcgtgatagacggcggtgaatacgacgggctgaaattcggcgagtatttggaaaaagtcggtgcgaaggcgcttggtgtgaacggtgcgaagtttaaggagttcccggtgcttatcaagttcatcgatgcgaagcagccgctttccgtgcaggtgcacccgagcgatgaatatgcgctgcgcgtggagggcgaatacggcaagaccgagatgtggtacgttgtggactgcgagccgggcgcttcgctgtacttcggcgtgaaccgtgcgctgacgaaagaggaattcaaaaagcgcattgaagacaacacgctgacggatgtgctctacaaggccgacgtgaagaagggcgacgtgttcttcattcagtccggtacgatccacgcaatcggcgcgggaattctcatttgcgaaattcagcagaattccaacacgacataccgcgtgtacgactacggccgccgcggtgcggacggcaagctgcgtgaactgcatattgataaagccattgacgtttccaagctgaccccgagcgacacgtccgacaagcagggcaagccggaggagattcccggaggcacaaagtgcgcgctggcttcctgcccgtactttacgacggagaaatatgttgtggacggcgaagtcgaaattgatgtgacgggcgattcgtttgcgtcgcttgttgtgacggagggcagcggcaaggttgtcggcagcgagaacgaagtggagttcaagccggcggacagcctgtttgtaccggccggcagcggcaaaattaagattaatggccactgcacggtggtgaagacgacggtttaaaaggggaaatgctatgaagatggagtttgtagacgaagccgaactgcagaaagctgcggacgagccggaggacgaggtgcgcgggcgcattgtgctggtcggcgagccgatggggcttttcattgcggaggagctcggcgagttggaggatgtgacacacttttcggcggctgtggccggtgcggaatataacgtggcggtgggactttcccgccttgaccatgaagcgctgtactgcacgcgcctcggcgacgacccggtgggcaaacgcattttgaagagcatgaaaggcaaccacgtttccgacgcgcttgtgaccgtgacggacacggcttcgaccgggtttatgatgaaaggcaggaccgaggcgggcgacccgaagatcgcatatttccggcggaacagcgcggcttcgcagatctcgacgcatgacatcgataagctcgacttatacggatgtgattttctgcacgtgacgggtatttttccggcggtgtcgaagtcggcattggacgcggtgaaacgattgatgagccgcgcgaaggcgctggatatgtttatttcgtttgacccgaacctgcgcccgcagctttggaaggacgaaaaagagatggtgcgcacgctgaacagcctcgcacaggaagcagacctcgttttgccgggccttagtgagggcaaaattctcacaaagcgtgacacgccggagggtattgcggagttttaccacgagcgcggcgtagacagcgtgattgtgaagctgggcgacaagggcgcgtactggtccacgggcggcgagcacggcacggtgccggcattcccggtgaaaagaattgtggacacggttggcgcgggcgacggctttgcggcgggcgtcctctccgctgtggcggagggcatgtccttgcaggaggctgcagcgcgcggcacggtaatcggctcgatacagattacacaccggggcgacaatgagggtctgccgacgcgtgcggagcttgagaccatcacaaaagcgggcattgtgtaaattctaataataacggtgccgcgcaggaaatgagggtttgttctgcgcggcattgtgctatttgtggagtgagaaaaatgggcagaaaagaaacggtggagctgacaaacatgtgcatggtggaggacggcaagggcaacgtactcgtacagaaccgtcttgacccgaactggtcgggtatcgtttacccgggcgggcacgtggaagcgggggaatccatcacggcatcggtcattcgcgaaatccgtgaagagaccgggctgacaatcgaaaatccgacgctgtgcggtgtgaagcagttttggcttgataacggcgtgcggtacattgtgtttttgttccgcgcggataaatttacgggcgagctgcacggctccgaagaaggcgatgcgttctggctgccgcgggaagagcttttcgagcaccagacggtggaaagctttgagggtttggtgcacgtttttgagacgccggaatgcagtgaagtttattataaagacggcgaaacgcattttgcatgatttgaaatttgaattcgggaggaaaattttatgacaccgcataacgaagcaaaaaagggcgatattgcaaaggtggttttgatgccgggtgacccgcttagagcgaaatttattgcggaaacgtttttagaggacgccgtgtgctttaacacggtacgcggtatgttgggctacacgggcttgtataacggcaagcgtgtttccgtaatgggcagcggcatgggtatgccttctatgggcatatacagctacgagctgtatcattgctacgatgtggaggcgatcattcgtatcggtacgtccggcggcattgcggacggcgtggagctgcgcgatttagtattggcgatgggcgcgtgcacggactcgaactttgcgcaccagtatcgtttgccgggcacatttgcgccgacggcgagctttgaactgcttgaaaaagcggtgcagacggcgcgggagaagaacttacgttatcgcgtcggcaacgtggtgacgagcgatattttctacggcgactgtgaaaatgagaccgccgaatggaaaaaaatgggcgttctggccgtggaaatggagacggcggcgctgtatatgacggcggcgcgtgcgggcaagcaggcgctttccatcacgacggtatccgacttaccgctgaagggggaatcgacctcgagcgaagagagacagaagacgttcacgcagatgatggaggtagcgctgacggttgcctctgaggcggtggacggacatgacaaatgaggtcataaaaaagctttcggaagcggcgcttgatgtgcggaaaaaagcgtactgcccgtactccggctttgcggtgggcgcggcgctgcttgcgaaaagcggtgaaatatacacgggcgtgaacattgaaaacgctgcgtttacgccgacgaactgtgcggagcgcacggcgttttttacggcgattgcaaagggcgagcgagatttcgtcgctgttgcaatcgcgggcggcaaggcgggcgaggagcccgaagatttctgcgcgccgtgcggcgtgtgcaggcaggtgatgcgggaattttgcggggacgcgtttgcgatcattcttgcaaagcccggtgaagaaaaggtttacacattaaaggatttgctgccgcagagcttttcgccgagagacgttctgggcgaaaaagcgaagcggtaaaaaaggcggtgatttttgtgctacatattttggacattatccgcaaaaagcgggacggcgggacgctgacaaaggacgagattgaatattttgtgcgcgggtgcacagacgggagtatcccggactatcagctttcggcgcttttgatggcgatttatttaaacggcatgacgcatgaggagacggcggagctgaccttggcgatggcgcattccggcgacatggccgacctttccgcgatacacggcgtgacggtggataagcattccacaggcggcgtgggtgacaagacgagcatggttattgtgcctgtttgcgcggcgtgcggggtgaagattgccaaaatgagcggccgcgggcttggacacacgggcggcacggcggataagcttgagagcattcccggtatgcggatcgatctttctccggaggaatttacagcgcagatcaataagatcgggtgcgcgatgatcggacagacgggcgagctgtgcccggcggacaagaagctttacgcgctgcgcgacgtgaccgggacggtggagagcgtgccgctcatcgcttcgagcatcatgagcaagaagatcgcttccggcgcagagcggattttgctggacgtgaagacgggcagcggcgcatttatgaagacaacggaggatgcgattgcgctcgccaaggaaatggtggagatcgcgaagctttccggcaggcgcgcagcggcgctcatcaccgatatggacaggccgcttgggcacgccgtgggcaacaccttggaggtgctggaagttttggagacgctgcacggacgcgggccggaagaccttacggaagagtgtttggagcttgcggcaaacatgatctggctcggcgagcaggcggaaagccttgaacatgcgcggaagaaagcgaaaacggcactggagacgggcaaagcgttcgagaaattctgcgaaatggccgaggcgcagggcgcggatgtgcggtacttgagagaacccgagcggtttgcgctttcgccggtgagaaaagacgtgtgcgcgccgcgcagcgggtatgtagtgcatatcaacgcggagcaggttggcatggcaagcgtgcggctcggcgccggacgcgagaaggccgacgatatgctcgactacggcgcgggcatcgtgctgaaaaagacggtgggcgacgcggtacaaaaaggcgaggtgatcgccgagctgtacggtgcgagcgcagaaaagtgccgcgacgcggaaagcgtgctgcacggggcgttccgctacggcgacgagaaaacagaagaatgttcacttgtactggcaagggtagagtaaaataaaaaaccgcacctgaaaaggtacggtttctgtgcgttcggttttaacgtttgcgattgaaatcagccgcgctcggggccggtgacgggctcgtcgtaatcaacgccgaaggtctcgacggtgactttcgtcatgacctgatcttcgcgcgggcggtcggaccaatcgcgcggggaggaaacgatggcctgtgcgacatcgatgccctcggtgaccttgccgaatgcggcatactggccgtcgagatgcggagcgtcatcgaccatgatgaagaactggctgcctgcgctgttcgggcgctggcttcttgccatggagagtacgccggtggtgtgcttcagatcgttcttgaagccgttcatagcgaactcacccttgatgccgtagccggggccgcccatgccggtgccttccgggtcgccgccctggatcatgaagccagggatgacgcggtggaagatggtgccgtcataaaagcccttctgaatgagggaaataaagttgttgaccgtgttcggcgcaatctcggggtaaagctccgccttgatggtgccgcgggtggtctcgaaagtaacaataggattctgcataccgaataactcctttcatagaggtctttcgggaagaaagaccgttcgtaaaattcagtataccatatttaatttgaaattggaagtgattttgttttgaagttgatttcttggaacgtaaacgggttgcgcgcctgcatgacaaagggctttaatgactttttagcggcggaagaccccgatgttatctgcttgcaggaaacgaaaatgcagcgcgagcaggcggattttgattttgcggggtacacggaattttggaactctgccgagaaaaaagggtatgccggcacggcgatctttacaaaaacagagccgcttaatgtgacgtatggcatcggcgacgaacagtttgactgcgaggggcgcgtgatctgcgcggaattcccggagttttaccttgtgaccgtgtacacaccgaacgctcaaagagagcttgtgcgcattgattttcgcatggcgtttgaggataagttccgcgcgtatctcgaaaggctgcacgaaacgaagccggttattgtgtgcggcgacatgaatgtggcacacaggcgcatcgacatcaaaaacgcaaagccgaacatcggcagcgcgggattttcgtacgaagcaagagggaagttttccgaactgctcgcggcgggttttgtggattcgttccgcgaattgtaccccgatgcaaaggacgcgtattcctggtggtcgtatatgggcaaggcaagagaaaagaacgtcggctggcgcattgactatttcctcatcacggaggagctgaaaaagaatttggcggacagcaagatcctctccgacgtgatgggcagcgaccattgcccggtggagctcatcttgaattttagcgaggaaaacgcatgatttttaaggagaaaaagacaccgacgcttttgatgatgcctttggcgaacggctggcgcgcggtgcacaagaaatataaaaacgaatacggcacggtgagctgcgccgaaaagggtgatacggtggaagtcgtgacggacttcggtgaattttccaccgagcgtacggaagcggtggaaagcgctgcggcgatgatttttgaaaacaacggcgtgaaagagattacggtggacggagagaagcttacccgcgaagcgtggcaggaaaaagaagatgcgcgcctaaatgcgctgcacaggacgcgggaggattacaaaaatgtgctcggaaaacccgtgcgctgcgtgacggacaggccgcttggctctgcgcacccgcgctatccggagatgatctaccccgtgaactacggctatgtgccgggcgtgatggcgggggataacgccgagcaggacgtgtacattttgggtccaacggagccgcttaaaacctttgacggcgtggtgatcgcagtggtgcatcgctttaacgacgtggaagacaagtgggtggcggcggaaaagaccggcgtttacacagcggaggaaatcctgaaaattctcgatttccaggaaaaatactacgaaagcgagctgatcctctaaatgaccgaggaactcatgcgcaggctacgggtcatcacgccggaggaacagcgcattttggacggcggcgcggtggacaaggcggcgtacacggcgcgggcggtgtttacggtggacagcgagaagcttttggagcgcgggcggctcatctccgtgcgcgcacacacgcggtttgcaccgttccccagacacgcgcacagctatattgaaatcatgtacatgtgctccggcaagacggtgcaccgcatcaacggcggcgagcccatcaccgtacatgcgggcgagctgctgtttttggggcgcggcgcttcgcatgagatagaacgtgcggaatatgaggacattgcggtgaatttcattgtgctgccgcagttcttcgatacggcgttggagcgcatcggcgcggacaacgcgcttgggcggttcatcgcgaacagcatcagccgcgcggggggctcggattttttactgtttagagttgcggatgtgctgccggtgcagaatctcgttgaaaacctcgtttggacgcttgtgaacgacacgaaaaaccgcagacgcattacgcagaacacgatggcgctgctgtttttggagcttttgaactgcacggataagctggcggcgagcgaaaacgagggcgatcacagcgcacttgtgatgacggcgctgcgggagattgaagaaaattaccgcacggcgagcttgacggacattgcggaaaagtacggtgtgacgatttcgtacctcagcgcggcggtacacagcacgacggggttcacgtttaaatcgcttttgcggcgcaagcgaatggagaaagcggcggcgctgctttccggcacgaagctttccgtgagcgatattatcatggcggtggggtatgagaacacgagctatttttacagggcgttttcggaaatgtacggcgtgacaccaagggagtatcggttgaggcagagaggttagtacgcataaaataacgccgcacgctcgatgaggaaaacgagggtgcggcgctgctttatttctgagaatttgccgcctttgaaaaggcgggcgaaacttttaactacgcttttcagaagcgcggtttacttcacgaatctcaaaacgttccacgaggttttcgtaaggttcgctttatagagattgccgtctttttcggttctgtccgtatggaacttcggggtgacggcgctgtgctcggcggtgttgacggccttcatatccgggttttcaaggacgatgtgctctgcgaggcggtaatcgccgaaggagcgcaggtcgaggtcgaggacgatgtcatccgtcaggctgcggttgacggcgaagacggtaacttcgtccttttcgtcgttccacacggcgatggactcgacgtcggtgacatcggtgaaatcgatggtatcgtgctttgtggaggtgagcaccggctggagcgcaatgccgcggccgtatttggaggcgtggagcagcggataataaatcgtctggcaccatgcggggccgttttcttcggtcataatgggtgcgatgacgttgacgagctgtgccatgcacgccatttttacgcggtcggagtgcttcatcagcgtgatgagcatgaggccgacgagcagggcgtcttcaaaatcgtagtggtcttcgagcaggtgcggcgcgatctgccacgggcggtttttcatggtgtcggcatcggtggcatcggcgtggaaccagacgttccattcgtcgaagctgaggttgatgtttttctttgcgcgcttcttcgccttgacgaaatcgcacgtggcgatgacggttcgaatgaagtgatccatgtcgtcgctctgggcgaggaagtttgcggtatcgttgaagcggttgccgtagtactggtgcagggagatgtaatcgacgctgtcatacgcccaagagagcgcggtgttttcccactccgggaatgtgggcatgcccgtgttggagctgccgcagagcacgagctcgatggacgggtcaatctgcttcatggctttggcggtctcatcggcaaggtggccgtattcgtcggcggtcttgtggccggtctgccacgggccgtccatttcgttgccgaggcaccagaccttgatgttgtgcgggtctttgacgccgtgcttgacgcgcaggtcgctgtatttggtgccggacgggtggttgcagtattcgagcaggttgcacgctgcttcaatgccgcgtgtgccgaggttgacggcctgcataatctgcgtgtcggcttttttcgcccactttgcgaactcgttgatgccgatatagttcggctctgtgctgcgccatgcaagctcaagacgcttcgggcggtcttctacggggcccacgctgtcttcccagtagaaattggagacgaagttgccgccggggtaacggacgatcggcacttgcagctcgcgcacgaggtcgagtacgtcgcggcggaagccgtcttcatcggcagtggggtggcccggctgccagatgccgccgtatactgcacggccgaggtgctcgatgaacgagccgtagatgcgcttatcgattttagaaatttggaaatccttttcaatggtgagttttgcctgttttgccatagacctgatctctcctcagaagttgtatgtacaatttatgtgttcattttagcttgaaagccttggattgtcaacctatttcggcggaattcttttgctgtgtgccgaaaagtgaagcgcggatttgtgcagtttggcgggagaaaattttgtgcggcagaaaagttaaaataaagatagttttaagtgaaaataacgtccttattttgggacacggttcctgctatactattgctgtaaacgaaaaaacggagggcttatatgaaaacgtatttggcggtggacattggggcttcaagcgggcggcacattttggggtggctcgaggacggaaaactgaagctgaaagaaatctaccgttttaaaaacggggcggaagaccaaaacggccatttgtgctgggacattgaccgccttgaaagcgaagtgacagacggcattgcggcgtgtgagactgcgcccgagagcgtggcggtggacacgtgggcagtggattatgttttgctcggtaaaaacggagaacgcatctgcccggcggtggcgtaccgcgacatccgcacggagacggtgccggacgagctggaaaaaacggtgccgtttgtgtggctgtacgaaagaacgggcattcagatgcagaagttcaacacggtgtatcagctggcggcgcagaaaaaagaaatgccggatgtatttgaaaaggccgaaaagcttttgatgatcccggattatctggcatacaggctttcgggcgtggccgtgaacgaatacacaaatgcgagcacgacggcgatggtctcggcagaacataagacatgggacaaggagatcatagcgcgggtgggtttgccggagaaaatcttcggcgcgctgcacaagccgggtgaagcgctgggcgggctgacggagcgcgtgaaggagaaagtcggctttgatttgacggtgcggcttgcggcttcgcacgacacggcttccgcgtttttggcggtgccggcgaaggatgagaacgcggtgttcctttcgagcggcacgtggagcctcatcggcgtggagctgaaagcgccggtgacgaacaacgagagccgtgcgcagaattttacgaacgagggcgggtatgagtaccgctatcggtatttgaaaaacatcatgggcctttggatgctgcagaatatgcggcaggagctcggcgacgagaacagctttgataagttgacggagcttgcgcagagtgcggcggattataagggccgtgtggacgtgaacgcagagtgctttttggcaccgaaaaatatgtgcgaaacggtgaaaaacgagcttatgaagcagggcttcaaagacccgacggtgccggagatactttcttgtgtttaccacagcttagcggaaagctatgccgaggcgataaaggcacttgaaaagctgacgggcaaagtatatacgagtttaaatatcgtcggcggcggcagccgggacgaatatttgaataagctcacggcgaaggcctgcgggctgcctgtgtatgcgggcccgacggagggtacggccatcggtaatctcatcgtgcagatgatcgcggacggcgagcttgcgagcgtacaacaggcgcgcgacgtgatacgggacagctttgaaattaaaatttacgaaccctgaaaagtgtattataatagagtaaaaacaaaacggaaaggacgataaaatgctgaaaggtaaaacggttttactgggcgtgacgggcagcattgcggcgtacaaaattgcggggcttgcgagtatgctgaaaaagcagcacgcggatattacggtgctgatgacgcagaacgccacgaattttatcaaccccattacatttgagactttgacgggcaacaagtgcctcatcgatacgttcgaccgcaatttccagtatagcgtggagcacgttgcgctggcaaagcgcgcggacattgtgctcattgcccccgcgagcgcgaatgtcatcggtaaaattgcgaacggcattgcggacgacatgctgacgacgaccgtgatggcgtgccgctgcccgattttgatttcgcctgcaatgaacacgaatatgttcttgaaccccattgtgcaggataatcttgcaaaactgagacgcttcgggtacacggtgatcgagccggacagcgggtatttggcttgcggcgatataggcgcgggcaagatgccctccgaaaaaacgctgtttgactggatcatgcagacgatcggtgcggagaaagatcttgcggggcagaaaatcctcgtgacggcgggcgcaacggcggagaagatcgaccccgtgcggttcatcacgaaccattcgacgggtaaaatgggctgcgcgcttgcacgccgcgcggcgatgcgcggtgcggacgtgacgctcgtctgcgcgaacatgaccgtggaaccgcccccgtttgtgacggtggtgaaagcggaatctgcggaagacatgttcaacgcggtgacgagccgtgcgccgaagatggacgtcatcatcaaagcggcggcggtggcggattaccgcccgaaaacggtcgccgaggagaaaatcaaaaagcacgacggcggcatgagcattgagcttgagcgcacgcaggacattttggcgtacctcggcgcgcacaagcccgcggggcagttcctctgcggctttgcgatggagaccgagaatctcattgaaaacgcgcgtggaaagctcgagcgaaagaacctcgatatgatcgcggcgaacagcctgcgcacgaagggtgcgggctttgcgggcgatacgaacgtggtgacgctgctgacaaaagacgaaacagaggagctgccgatgctctcaaaagacgagacggcagaccgcattttaacaaaaatcaacatacttcggaaaggatgaacgatatgacacagtatgaggcggcaaaaaagcgctatgccgagcgcggtgtggacgccgacgctgccatcaacacgctgaaaagcgtgccggtctctctgcactgctggcagggcgacgacgtgcgcggctttgacggcgacccgaatgccccgctgacgggcggcattcagacgacgggcaactaccccggccgtgcgcgcacgccggaggagctgatggcggacatcgacgaggtgctgcgcctttgtcccggcacgaagaagctgaatttacacgcgagctacgcgatcttcaccgaagaaaacggcggctgggtggacagagataagctggagccgaagcactttgcgccgtgggtgaagttctgtaaggagcgcgggctgggatgtgactttaacccgacgtatttttcgcacccgaagtgcgacccgctgacgctctcgagctcgaacccggagacgcgcaaattctgggtggagcacggcaaggcgtgtatccgcatttcacaatatctggcggaggagctcggtcagccgtgcatcatgaacatctggacgggcgacggactgaaagatattcccgccgaccgcatgacgccgcgcatgctgtataaagagtctctcgatgcgattctctctgagccgtacgattttaaccttgtaaagccgtgtgtggaatcgaaggtgttcggtatcggggtggaggcgtacacggtgggcagtgcggaatttgcgctgagctatgcggcgatgaataaagataagtgcatcccgctgctcgataacggccactaccacccgacggaggtcgtatccgataaaattccggcgatgctgacgttcttcccggagattgcgctgcacatcacgcgcggcgtgcgctgggacagcgaccacgtggtgctgtttgacgacgagacaaaggagattgcgaaggagatcgtgcgctgcggcgggctttcgggtcgtgttaagattgcgctcgattactttgacgcgtccatcaaccgtatcggcgcgtgggtgacgggcttccgcaatgtacagaaggcgctgttgttcgcgctgttgcagccgacggaggagctgacgaagctgcagaacgagcaggacttcacgtctttgatgatccgcgcggaggagttgaaaacgatgccgttcggcgatgtttgggcggaatactgcaaggagcagaatgtccccgcagacgacatggcgtggctttctgaaattaaaaaatacgaaaacgaagtgcttttaaagcgctgaggaggtatataaaaatgatgacggaaattcccgcagtacgcggttttatccgcatgtgcacggacggctgggagcagggctggcacgagagaaacggcggcaacctgacctaccgcatgaagccggaggaagtggagcagtgccgcccgtttttcaccgcgccgcgcgagtggaacagcatgggcgtgcaggcagataacttaaagggcgaatatttcatcacgacgggcagcggcaagtttttgcgcaatgtgcaggatgacccggagcacaacatcggtattgtagagatcaatgatgcgggcgacagctggcgcattgtgtggggccttgagaacggcgcgcgcccgacgagcgaattcccgagccactttatgaaccacagtgtgcgcaaggcggcgacgaacggcgtttaccgcgtcatttatcacgcgcacacgccgaatctcatcgcgatgacgtacatcatgccgctgacggcgcgcgactttacgcgtgctttatggcagagcgccacggagtgcccggtggtgttccccggcggcgtgggcgtggtgccgtggatggtgccgggcggcgcggacattgcgatggcgacgagcgagctgatgaaaaagtatgacgcggccgtttgggcgcaccacggcttgttcgtttccggaccggattacgacattacgtttggcctcatgcacacgatcgagaaggcggcgcaaatttatatgcttgctattacggcgggcggcggtaaaattcgccagaccattacagacgacaatttgagagccattgcgaaggaattcggcgtggagctgaacgaagaatttttgaactgatatttacaatttcgttacaaacaatctgtgcggacaggtgtataattaacttagttaaaaatttcccgtattggggattaggagatgttttttatggtcagcagaatcgtattgaacacaatttcttatcacggcaaaggcgcgattgagaagattccggaggagcttcaggcgcgcggctacaaaaaagcttttgtttgctcggacccggaccttttgaagttcggcgttacgcagaaggtgacgaatcttctggacaaggccggcttcccgtattccgtttacagcgagatcaagccgaacccgacgattgagaacgtacagcacggcgttgaggccttcaaggtttccggcgcagactgcatcgtgaccattggcggcggctcctccatggataccgcaaaggctatcggtatcatcattgagaacccggagttcgcagacgttcgctctctggagggcgttgcgccgacgaagaagcacgcggtgttcaccattgctgtgccgaccactgccggtacagctgcggaagtgacgatcaactacgttatcaccgacgtggagaagaagagaaagttcgtctgcgtagacacgaacgacatcccggagatcgcggttgttgacccggatatgatgtcctccatgccgaagggtctgaccgctgcgaccggtatggacgctttgacccacgccattgagggctacatcacgaagggcgcctgcaccatttccgatatgttccaccttgaagccattcgcctgatttccgagaacctgcgcggcgcggtgcagaacaccgaagccggcagagagggcatggcactcggtcagtacattgcaggcatgggcttctcgaacgtcggtctcggcatcgtacactccatggcacacggcctctccgctctgtatgacaccccgcacggcgtggcttgcgccatcattctgccgaccggccttgagtacaacaagtccgttgcaggcgagcgttatcgcgcagtaggcaaggccatgggtgttgagggcattgacgcgatgaccaccgaagaggctgccgatgcaacgattgcggctgtgaagaagctgagtgaagatgtgggtattccgacaaacctgaagggcatcctgaaggaagaggacgtacagttcctcgcagaaagcgcatttgcagatgcttgctgcccgggcaacccgcgcgacacctccgttgaggagattgccgagctgtacagaagcttgatgtaatcgttttttgcctaaggtaaccgaataaacatagagacccccgctttcggagctttccgggagcgggggccttgtgcgttatggggttatacggatttttttgcgggaagacgcgcagagagcttttcggtgatgcggcagaacaggcggcggatattttcgatgccgacggctgcaagcacgcagaaaagcggaacgttggtgtacaaataacgggcgcgtacttcaaacagaagctcaaagacggtgagaccgatccatgtgagccacaggatatttaaggtttttgcgtgcttatgactgaagctgctgaacagaccggcggcgccaagcagcaagatcatgagccaaatgaattgctcgaaggttgtgaaatacaaatagcggctgccgtcggggtagtagatgctgcggaggaagggcgcggcttttgtattgggcggatcaaaaacggtttgaaggaaatgtccctcttttccccatgcgaatgtgccgtcattatagagcgtgagcattttttgcgcgagctgtttgagcgtgccgaaaaagcccatttcctgtaaacgctgtttgccgacggcgatatttgcctgcgtgcgctcggaagcggtgacaaaagaacgggaatagcgaacgtcttcggcggaatagacaccttttttttccgggttaagacccatcatccagaaatgtgcaatgccgaagctttgctcgttatcaagctgaatgtgatagtgggaacacagaaaacctgtaccggctttaacggcgaaaaaggtgatggcgactgtcaaaagtgagagcagaagcggttttaacaggtgcttttcggacagtgcgtaaataccttcaatcaaaaaaacggcgataagcaaaataaaacactgcggcttgataaaatacccgagtgtgccgatgatggcggaaagcacataggagagccatttgtattttgccggacggatgaatacatagagtgtaaggatagggaaaatcagccctaaagcgtctgtgtagcagatgacgttccacggggaaagcccaaagctgagtaccgcgagaaaaaagccgaaaaaagcgtatagctttcgtgtgagctgcgcggcggttttataaacgagcagacaggaaagcgtattgagtgcgcagttgacggtgatgacgcacaaaacctgctgtgtatcggggaaaatgctgaaatatttattcagcttaaagacgaacagctcgaagaaaaagtacagcagattattgggatagttggaaaaatagcggatatcgaccgaatgcttgtgcatcagattgcgggcgttttctgtaaggaggcccgcgtcccaaccggtttcgaaataaatgttataggaaatatagagctgtgcggaaaataaaagcagacacagaccgtatatgagcacatcggacgatacggtcggccgatgccacgaaagcttgacctgttgcaggcggtcaagggacagaaacagcacaaaaagggcgatgccgaacagaagcagagcgatatttgagagcagaaatgtctgctttttggcgtatgtacattgcgtaaaaaacaggagcaatacaaaaacgcagccgaaaacggagccgaggaaaaatttggaagctccgaaagcgaattttttcataaaatgtacctcttaaactcaacatgccgtgagcagcgggaaaagaaatcccgaactgccgagacaattcgggatccggtttggttagcgtatcagtgttcgtccaagactttttcttccggttcggctttgaggtgggtttcgatgaggaaacgggggcgctgcttgacttcgctgtaaattttgccgatgtagccgccgacgacgccgaggcagagcatttgcaggccgccgagcagccagatggacgcgacgatggctgtccagcccgcgacggtgacgccgcacaggtgcgagatgagcgcgtacaggaggccgaagatgctgaggacggagatgagaatgccgaggttggagatgagctttaagggctttacgctgaacgacgtgatgccgtcgagcgcgaaggagatcatcttttttaaggggtatttggattcgcccgcgaaacgctcggcgcggtcgtaatagacatagtcgcttttaaagccgatgagcggcacgatgccgcgcagaaacaggttgacttccttatactcggaaaggccctcgagcgcgcgacggctcatcaggcggtaatcggcatggttgaagacgacgtctacgccgagaatcttcatgaatttataaaagccctctgcggtggtgcgcttgaagaacgtatcggtctcgcgcttgttgcgcacgccgtagacaacgtcgcagccctccatatatttttcgacgaagcggtcgatgacgttaatgtcatcctgcaggtcggcatccatgctgatggcgcagtcgcacagcggcatggcggtcatgaggccggcgagcagggcgttttggtggccgcggttgtgcgcgagctttacgccgtccacatagggaatagcttcagcatattcggagataatcgcccaggttttatccttgctgccgtcatcgacatagagaatgcggctttcgggatcgacctgctcggcgcggatcatggtgtgcattttttcggtcagacgcttggtggtctccggcagcacggcttcctcgttgtagcaaggaatgacgaggtacaagaccggaatattacgttcagtcgtcattatcaaaaccttctttcttttccaaagcgcggtcggtttgactgcgcggttttacgtgaataagcccgctgttttcaaaatgcgcgccgtgcttttttgcatagtgggagagcgggcgcagcaccatattgtggcgggcgagcggcacggggacttctttgaagaccgtgcgcatgagtaccatatacagtgcgagcagaagcacgcacacgacggtgatagctacgccgaggaacaggccgggcgtgcggtatttgaactcgatcttgacattggtgccggcgttgacgcggatggccatgaagccgacgttcaccttttcgatatcgaccttttcgccgttgacgtaggccgaccatccgttttcatacgggatgctgaagaacacgggcacgtcgcggcttgctgtgatggtggcgttaaagccggtatttgtatattcaaaggtatcgcaggtgagctttgcacggttttcgcaatctgttttgtaggtttccttggtgtaggaaagttcgcttgtatcgagcggagaaagcatatcgccccagtttgaaacctgcttatcggtgaggacgatgcccttgagcatcaaaagctcgcggtagctttcgcttgtgttttcgtaatccttttcggtgacgtagctgtcgtaggtgaagcccatgggaatgtaatgttcgttttcccaaatgtcaaagccgtttgtgttgccgtagtacatccagcccggcatggcggggtcggcgtagtcttcgccggcgaaatactcggtatcgtgatcgtcgtcaaaaagatacttgacgcttgtcagtccgcgcaggccgtagtgagtggtatccgggcgggaagcgacatcgcgctgcacgccgatggaatcgtagaactccatgagcgagccggggacgatgctgtggaacgcctgaatggactgtacctcccagaacatggcggagttatcgaggctttcgtagaaatccgtacggacgttgtcgtcgcgcagatcgtctatggcgacatccgcgccgccgtttaaggcgtaggggatgatgtggtcataggtgtaatccgactgtgttttgccgagcgcgatgaagaaaacagaatacagcacgatggtgatgctgaggcagacggacgcagcgcggtagaacgggcgggagccgcggttataaaatgcaagaacaaagccgacgagcgcaagtgagaggagcgcaatggcggcgtatgtccagaagcgcgtggggtatttttcgaggccgaatgtgacatcggtaatctcgccgtccgttttggtgagtgtgggcatgaggccgatgacgagcgtcatggcgagcgtgatgagcgttgtccactttaaggagcggcgccaatcaacacgcgggttttcgagcgccatcatggtggcggcggccatcatgagcgtgagcatatagaaccaacgtgcgtaatacgacgcgttcatgagctggaacaaggcgttgaggccgggaatgaatgccatgaagaacaggacgtagagcatctttttcagccagtggcggcgcttcagctgcatccagccgatgacgccggtcatgctgaacatgggcagccatgcgccgagggacgcccatttggattcggaatccggggtgaagttcgggcgtgcgggaagatccggcgggaagaagagacactgcaaaatgtggatgtagcgctgattgcggtcataaagcagggcgctccagccgctgatgggattggaaacgcggtagttttgaatgatgcacagaacgcttggcacaagcagaatgcacgcgatgccgaggccgagcacggcttcgagcgcgagcaggaggaaatctttgaccgtgatgcgccagctgccggagagcagacgcacaaagaagtagatgaccgtgaatgtcaccatgccgacgaagaaataataattcacgatgcacgcggcggcgaccatgagcgcaaaaatgccgcggcgctttgtgtacatgtattcatcgagcgcggctaagagcaaagggaacacgatgatggcttcgtggaaatgattgaagaaaatgttgtagatggagtagcccgagaacgcgtataagagagacgctaagagcgccgtgttggggttctttgcatagcggtgcagataaatatagccagagagggaggcgcagccgaactttaggatgaacagcgggcccatgaggtattgcagccactcgcccgggaacggaatggtgagccagaagaacgggctgccgagcaggtagaacgaataggaaccgatgaaattgacgccgaggtctgttaaatgattccagccgatgttgccggaacgaatggcatcgtgcgcgatgcggtagaacggcacctgctgcacattgaaatcgccgtagaacagaaagcggccgccgtctacgatcatgaacggcacaaagatgacaaaggccagagcgaggccgaaaaggaaggagaagaggaaataattgccgcgcggcttttgctggatgcgaccatcgcgcacataagattttgaggtatccaagtgaatgtcctcctgtatgtgaatttagaatgaggtttcttgtaagcgtggttaaaagtttttgatcgaccttttttcaaaaaggtcgtggggtctcggggtgaagcccagagtcgtcgtccgcagacgacgaaaacttttttgcctcccaaaaatcaggacgggagtgaaaacagtccggtggactgtttttgcgcgggagacccaattaggggggtctcccgaaaggcgtgtaacgcctttttaaaagagagattccccgcatctatatttaagcccagtataacacaaataaagggtagattaaaggcaaattctaatttttaaggaatttttattgaaatgtgcggggcagttcggtattataatataagtaaaattaaaaatacagaaaaatcagaaggatataaaaatgaaaatcggaaatctgactttgaacggtgtggcggcgctggctccgatggcgggcgcgaccgatcggccgttccgcgagctttgctgctcgtttggcgcagcgtactgcgtgacggaaatggtctcgacgagagcgctgcagtataactataaaaaaacgcaggagcttatcacgctcggcgaaaaggaacaccccgtcgcgatccagatgttcggcgacgacccgctcatctttgcatctgccgcaaagcgcgccgcagcggccgggccggatgttattgatatcaatatgggttgccctgtgccgaaaattgcgggcaataactgcggcagcgccctcatgaaaaagccgccgctgtgtggggacattgtccgtgccgtgaaaaatgcggtcgacctgcccgtgacggtgaaaattcgtaagggctgggacgaaaacagcgtgaacgcggtggaggttgcaaaatattgcgaagacgcgggcgtggacgccatttgcgtgcacggcagaacgcgcacacagatgtatgagccgccggcggactgggatattatccgccaggtgaaggaagccgtgaaggtacccgtcatcggcaacggcgacgtaaaatgcgtgcaggacgccgtgcgcatgatgaacgagaccgggtgcgacatggtgatgatcgggcgcggggcgctcggcaatccatggatcttcagggagatcaacggctatttcagcagcggtctgcgcattatgccgccgccgacgcttgcggagcgcattgtggtcattaaaaagcatatggatgcgctgtgcgccgcaaagggagaggggcgcggcatgcgcgaagcgagaaagcatgtggcgtggtacatgcacggtttgcgcggtgcggcggaattccggcgcatggcgggcgagctggaaacgctcagcgacctcgataaattgcttgagaaagtgtatatagaaaacaaagacgtgtcttttgacccgtaacggaaaggaagatcagcgtgaagcttttggtactggacggcaacagcattttaaaccgcgcgttttacggcattaagctgctgacaacgaaaagcggcgagtttacaaacggtattgtcggttttttgaacattctggaaaaagtaaaggacgaaacggagccggacgcggtggccatcgcgttcgatatgaaagcgccgacattccgccacaaggcctatgcgggttataaggcgcagcgcaagggcatgccgccggagcttgcggcgcagatgccggtcttaaaggaactgctcggcgacctcggctataaaatcgtgacgtgcgagggctgggaagcagacgatattctcggcacgtttgcggaaacgtgcgaaaacacggacaatacgtgcatgattgcgaccggtgaccgagacagtctgcagcttgtctcgccgaaaacgacggtgcgccttgcaacgacgaaattcggtcagtctgccgtgacgctgtgcgatgaggcgtatatcaaagagacgtacggcgtggaaccgaagcagctcgtcgacatcaaggccattcagggcgatacctcggataatattccgggcgttgcgggcatcggcgaaaagggtgcgggcgagctgatccgcaagttcggctctttgcagtatatttacgacaatttagatgagctggacatcaagcccggcatgagaacgaagctgatcaattccaaagacaacgcgtttttgagctacgacctcggcaccatccgccgcaatgcgccgatcgatacggagcttgcgcattatattcccggcgagggtgaccccgcagccgcggcgcagatcatgacgcgtttagagctctttaagctgatggaacgcctgcatctgactcccggcgcggcaccgacggcgaacagcgcacaggccgaagaagcgactttgctgcccgtgaagaattataaagacggcgcagcggtgctcggccagtgtgaggacgagggggcagcgtactttgtgccggtgtttgaaaacgacgaattaaagcaacttgtgtttaacggtaagttcgacgcgggtaagccggcgattgcgatcgtggatgcggacgacgcgtttttgaaggcgttcctcggcagcaaggtgacgaaaaagtacacgttttcgctgaaaaagctgcatcgcacggcgctgcatttgaagacttcccttgaaaacgccgtgatggacacggagcttgcggcgtatcttttgaacccctcgggctccgattacggtgtgctgcgtttggcggcggaatacggcattgccgtgcccgcatatgaggacgcgaacgtgcaggcggcggctgtgctgcctgctgtttgtgcggcgctgcaaaagggcatcgacgaaaacggccagcatgaattattggagaacattgaaattccgcttgccttggttttgggcgagatggaggaaagcggcttccttgttgaccgcgaggccataaaaacctacggcgaggcgctttctgagcaggtggacgcgctgcagaaggagatttacgaagacgtggggtacgaattcaacatcaactccccggtgcagctgggcgaagcgctgttcgtaaagctcggactgccgcacggcaaaaagacgaaaaagggatactccacaaatgcagatgtgctggagggtctgcgcggcgtacatccggcagttgataaggttttgcgctaccgcacgctgacgaagctgcgctccacgtactgcgagggcttgctgaaagccatcacggcggacgggcgcattcactcgagcttcaaccagaccgaaacgcgcacggggcgtatttcctcgactgagccgaatttgcagaacatcccggtgcgcacgccgcttgggcgtgaattccgccggttcttcatcgcaaaagaggggaatgtgcttgtggacgccgactattcgcagattgaactgcgtgtattggcgcacgtggcaaacgacacgcagatgcaggaggacttccgccttgggcgcgatatccacaccatgacggcggcgcgtgtgttcgatatgcccgaagaccttgtgaccccgcagatgcgcagccgcgcgaaagcggtcaatttcggcattgtgtacggcatcggcgcgttctcgctttcaaaggacatcggtgtttcccgccgcgaggccgaggactacattcacgattacctgcgcaactataagggcgttgcagactatatggagcgcgtggtggaggaagcgaagaaaaacggctatgtggagacgctgttcggccgcagacgctatctgccggagcttgcaagctccaacttcaacatgcgtgcgttcggtgaacgtgtggcgcgcaacatgccgattcagggcacggcggcggacatcatcaagattgcgatggtgcacgtgcgcaaccgtttgaaagccgaaaagcttgacgcaaagctgattttgcaggtgcatgacgaacttattgtggagtgcccggaagcggaaagcgacacggtgaagaaaattctggaagaagaaatggcaaacgcggtgcagctgagcgtgccgatgctggcagaggccggaagcggtaagagctggtatcaggcgaagggctaaggaattatgatgatattttgctgtcccgcatgcggcggcgcgttggaaaaagcagaccgcgcgctgcgctgcgcaaacggacattcttatgatattgcgcgccaggggtatgtgcatcttctgcccgtaaagcagatgcacgcgaagattcccggagacacaaagcagatggtggacgcgcgccgcgtgtttttgagcggcggctactacgatgcgttccgtgacaaactggcggagctgacggacaaatatctgcccgagaacggcgttattttggacgcaggctgcggcgagggcttttacacctcggctttatatgaaaaagccaaagcgaaaaacggttcggtttccggcgtggacatctcgaaattcgcggtaaaagcggctgcgggcaaatataagagcatcgatttcgcggtggcgagtttatttcacctgccgtgtgcggaaaacagtgtggatgtgctgacggacgtttttgcgcctattgtgccggaggagttttttagggtgctaaagccgggcggcgtaatgatccttgcggtgccgggtgcgcggcatctgtacggcatgaaagaggttttatacaaagagccgtatgagaacgaagagcacgacacggcctacgacgggtttgaatacctcggacgtgcgtgtgtgcaaaagtttatcacggtgaacgggcaggagaacattgaagcgctgttctccatgacgccgtactactggaagacggacgtagagggcggagaacgtctgcgcgcgctcaatgtgctcgagaccgagattaaatttgactttctggtttacaggaagaagtaggcgggtgcgcctttcagcagctttgtgcggcacaatgttgtttattgttgttgttttgttgtcattcattgaaaattaaagaatacttagtagaattctctcccgaactgtgctatgataggtagcggtcgttcgggagcgttttcattttggaagacgaaatacgaccgattatagaagtattcgaggtttataatcaaagatgaaaattttgtttgtctgcaccggcaacacgtgcagaagcccaatggcggagggcattttccgccgcgaaatggagcagcgcggctttgagaacatcatgtgccaaagcgccggtctttccgcgctcgatgggcagcaccccagcgaaaatgcggtgctggcctgcaaggagatcggcgtggacatcagcggtcacattgcgcgccgctttacgccggaagaaatcgatgtgtgggacgtttatttcacgatgtcgaaaacccacgcgtacattttgatgcaggcgggtgtgccggcggagaaaatttacgtgccgcattacattgacgacccctacggcggggacctaaatacctaccgcaaatgccgcgacaagatctgcgaggaattgcagacgtttgagcagcatcttggtttttaaggagcgtttatgcagattgtttcgatgacggcggagcacgtttcgcgccttgcggagcttgaaaagctttgcttttcggaaccgtggagcgaaaagagcctgacggaggagattgataatcctgccgcgtgctttttggtggcgatgcagcaagatgaggtgctcggctacggcggcatgcacacggtgctgggcgaaagctatgtggacaacattgcggtgttcccggagtttcgcggccatggtgtgggcagaacgctcatggcggcgctgatcgaaaaagcgcgggaaaacggcggcgttttcatcacgctggaggtgcggacatcaaacctgccggccattgcgatgtaccgttcgctcggctttacagaagcgggcgtgcgccgcaatttttatacagaaccaagagaggatgcgctgatttttacgctctccttttgaatttttagctatacgggggtaaaaagtatgcttttcggaaaaatcaaggcgcttgtcgaatacggcgtgcgcacggggctcatcgaagcggaagacatgatttacacgcgcaaccgtttattggaggcgctttgtgaagaggattacgcggatgaggaagcggagcagagcgaaaacctggcacttttgctggacggcctttgcgacgaagccgtaaagcgtggcatcatcgaggacggtgcgacgtcccgcgatttatttgacacgaaactgatgggccttttgacaccgcgcccgtccgatgtgaaccgcacatttcgcgcactttacaaggaatccccggaaaaggcgacggactggttctataagctttgcggtgactgcaattatatccgccgcgaccgtgtggcgcgcgatttaaagtgggtgtataacgacccgcgtttcggtgcgattgatattaccatcaacctttcaaagccggaaaaagacccgaaggccattgctgcggcaaagaaaatgaaggcttccggttatcctgcctgtatgctgtgcaaggagaatatcggttatgcgggccgcatgaaccacccggcaagacagaaccaccgcgcaatcccgatcacggtgaaccatgcggattggtttttgcagtattctccgtatgtgtactacaatgagcactgcatcgtgttttgcggcgagcatgtgccgatgcagattgacaagagcacgttccgcaagctgtttgattttgtggagcagtttccgcactatttcctcggctctaatgccgatttgcccatcgttggcggttccattttgacacacgaccactaccagggcggccactatacgtttgcgatggcgcgcgcgaacatggaggagcactgcacgctgcacggttttgaagatgtggaagcgggcatattgaactggccggtatctgttttgcgtttgcgccataaaaacccggagcgcctgatcgacgcggccgaccacgtattgaaagcgtggagaagctacacggacgaggacgcgttcatttttgcggagacggacggcgagccgcacaacaccatcacgccgattgcgcgctgtgtggacggcgtatacgagctcgaccttgcgctgcgcaacaacattacgacggaaaaatatccgctcggcgtataccacccgcacgacgaatatcatcacatcaagaaagagaacatcggcctcattgaagttatgggcctcgcggttttgccgtccagactgaaagacgagctgaagaccctgaaagacgtgatgctgaaaaacggcgatgtttcaagcgtggagagcatcgcaaagcacgcggagtgggcagcgcaggtgaagcgcgaccacccggaaatgaacgaagcgaatgccgagcacatcttgcagcaggaagtgggaaaggtgtttgtaaaggtgctggagaacgcaggcgtctacaaatgcacggcagagggcagaaaagcgttcagaacgtttgtagaaagcgtacgctgaatcgaaaataatacgataaaataaggaatccaccgtatgcgtgaaagcgatacggtgggttccttttaattcgtgatgaaaccgcttcaaatttctttgccgcagtatggacggattgcgtttacgtgttctttaccgtgtctttcagcggttcgcttttcgtgccgtcttcgttgaccttctgcatgttcgggtagacgagcgcgaggtagtcgtcatccaagtgcttatcgaggaacatttggaacgagcttgtggcggggatgccctcggcgcgctcgttggcgcgggtcagcgcggcgcaggagatgagcccgtcaaacagcatgaacgcaacgagcaaaatggtgaggatagcgcccgggcgcttcgggattttttcgatcatgcgcgacatggcggggtaaatttctttgatccagataaggccgagcgtgccccagatgagcgcgaacatcaagtttgtgcggccgtcaatgttgaacggcgtgccgctgtaatcccatgaaacggtgccgaacagcatctcctgtccccaactgcacagatactcgaacgccgcaccgatgatgccgctggcaacaaaaatgatgatgtcgtcctgcttgtagagcttatacaggcacagcgtgatgatggctgcgccgccgccgtaaatgggctggaatgggccgtacacaaggccgacgcgcagctcaatctggtgcgcgatgaagaacgcccagcattcttcaagcacaaaaccggcaaggcagccgatgaagaagatccagaagagttttgtgaagttcatgccgaacgcaaacgggcggtcttccgggttttcgaatgtagcttcatattcatagcggttgcgtttccagcgttcggcggagcgctttttgcgctcttccgtcgtgatgcggtacgcttttaattccttttcgtactgctcgttcgtcatatccggcgaggcgctcatgaagcggcgctttaagaagttcgatttgttgaggagtgccgtgtagttttcgtcggcggtcttctgtgcttcctgaagcttcttttgcaggtcgaggtcatcgatggcctccgctgcgccgatggcaccgccggtgacggcattgccgagggcgtttctcgcctcgcgcacgcggtctccgagttcggataagcgtttaaactggtgattcaatcgctgcacggtgatggacgtgatgatgatgtcgagcagcatgatgccgaggacggcatagaggatgacccagccgacggtgcggttgacgtagtgcagaagtgacgtgagtaccggcacgatgaacatcacaatgaacgagaagcacacgccgcgcacggtggcgacgggcacggaaacgtagcccttgatattccacttgaatttggagtaatcacgcaggcggatgtgcgttgttttgcgcagcagccacgcgaacgtgaattccacaaggaagcttgaaatcaggcagaaaaacagcgtggcaacaaacgacgtctgccaatgcagcgccgtcaatgccgcccacggcagcgcaatcatcaggccgtactgcgggcagtacgggccgttcagcatgccggggtttttgaattttcggtataccatgccgatgtaccccacctctgcgacccagccgcagaaggaagcaagcacaaagtaccatagaaaaagccagatcttatatgccatgcgtgcatctccttaaaccatcgagcgtcctatgtatatctcggaaaagtataaaacagtatagcatatttcacggttttcaacaatacttctgcaagaaaaaactgtcggaaaccgcagcaatatcggaaattttgaggggaaaacaaaattgggaattgttttttgacagtagctgtgatacgctgttaaaagaaattcagaaaggtgcgaatctgttatgaaaaagttactggaagagttcaaacaatttattgcgcgcggcaatgtgctggacatggccgtcggtgttgttgtggcatctgcgttcacggcaattgtcaacgcggttgtcagcggtcttttgacgccaatcatcggtcttttgctcccggatacgacgtttgcggaatgggcgccgggcggctttgccatcggtgaggtcatcaatgcggtcattacgttcttcatcacggctgcggctgtttttgccattgtgaaggcggtaaacgccgtgtcgaacctgaagaaaaagccggaggaggaaccggcggctcctaccacgaaaacctgcccatactgcctgatggatgacgtgaagatcggcgcgacgaaatgcccgcactgcgcatccgtgcttccgccggaagacgaagaggaaaagaaggacgcataatatctcgcttatacatacgcggctccacggtgctttcatgcgccgggagccgtttttctttttattgtccgaaggactatagcattcgccgacaggcgaatataattaaggcgcacttccgggaaagaaagtgcgccccaatcagcattactatttcatttagcttcggtaagattaccagccgaggcccttgaggtaatcgcggctcatcttcacggcttcgagagcgggagtgtcataagactgatcctgctcgacaacgacccacttggagccggcttccagtgctgcatcgagcaccggcggaatgttctgcatgccgtggccgaccggacggaactcgaacttgccggtttcttccttcttctcggtctcaatgccgatgagctcgtacatgttggccggcttaccttccttgtagaagtccttgaggtggacgaccggtgcgcggccggcgtacttcttgatgtaatcgaccggctcttcgccggcgaccttgacccagcagatatcaagctcggtctggagcaggtcagcgggaatctcggtatagatataatcgagtgcatactgaccgttcggcatctttacaaactcgaaatcgtggttgtggtaaagcagcgtgatgccgactttcttgcaggcttcgccgatcttcttgaaggtctcaatgttcttgaggaacttctcggtgcccggacgatcttcttccatcagatacgggatggcaatgtactgcatgccgatctccttgtactgtgcgaccgtgccttcgatgtcggcttcgagctcctggaacggaacgtgtgcggaaagcggaacgaggcccacttcttccaaaatcgccttgacttccgccggcttcatgccataaaggcctgcaagctcaacgccgtcatagcccatgtccttgattttctgcatggtgcccttaaaatcgcgctcagcgtcatcgcggacagaataaacctgtaccgctacgggtaaagttttcatggtgaactcctcctaaattagtggattgcttttctttatcatacaatcttttttgtgaaaaatcaatccgtattatgaaaaattcccgaatattcgcaatttcagagccgaaacaattcaaaacggcgttatcttgcagttcatcttgcagttcacgtctaaaagtagtataatcatgcgtatcgataaacggaaaattcaaatttaaggaatgaagaaaatgaaacgaaatttacgcttttattttgcgctgatgttcgcccgcggtacggcgctggttttaaagctcatcgggcgaaagggcacgtccatgccgggctcttgggctattattctgtgcccggattttatcgggcgcatgccgaaaccgaagaagatcatcggcattacgggcacgaacggcaaaacgactgtctcgaacatgatcgaggatgttttggaggataacggcatcgagttcatgtgcaaccgctccggcacgaatgtcgcgaccggcgtggcatctacgctcattgcgaacagtcactttttcggcaagccgaagtgtgaccttgcggtgtttgagctcgatgagcgctctgcgccgaacatttacccctacatgcagccggacattgtgctgtgcacgaacattttccgtgattcttataagcgcaacgcgcacgcggagtttatcctcgacattctgaataaggaaattccaaagggcacaaagctcgttttgaacggcgacgacccgctttgcagctccattaagcccgaaaacgatcgcgtgtatttcggcatcgaccaccttgacacggacaaaaaggaatgcgacaatatcgtaaatgatgtgcctgcctgccccaaatgccacggcccgcttgtgcacgacattgtgcgctaccatcatatcggccgtgtgcactgcgaagcctgcggctaccgctcgccggacatcgactaccttgcaacggacatcgatacgaaagacatgaaaatgaacgtggcggtgggcggcaaaaaatcggaatacccgcttttgaacagtacgaatatcaatatttataactcccttgccgccattgcgacgctgcgtgaattcggcctttccgaagaaaaaatccgcaattccatggagaaaatgggcatcagcgagacgcgttactccgaaaaagaagtgaacggcagaaagtacattctgcaccttgcaaaggggcagaaccccattgcgtgctcccgtgcgtttgaaaatatccgtaacgcgccgggcaaaaagtccgttgtgatgtttctcgacgactacttcgatgcgcgccacaccgtggagaacaccgcgtggttctacgacaccgattttgagtttttaaatgacccgagcatcgtgcaggttgtcattgccggtgcgcgccaccacgatacgtatgtgcgcacgcttctggccggtgtgccggcggagaagatcgtgcacatgcgcgatgaaagcgatacgcctgcggcggtctcgaaagaagcggacacagtctttattctgtacgacgtatacaccattcgtttggcaaatgacattcgcgataagatgatcgaacgtgagaaggagggcgaaacgaaatgaaaatagaagtccttttcccggaattctgcaacctgttcggcgacgcgtacaacatggtctaccttgaaaaaacgctgccggaagcggagtttatccgcacgaaattcagcgacgatgtgcgctttaccgaagaaaaaatgaaccttgtgtatatgggtcccatgacggagcgtatgcaggagcaggtcatccgcaagttgatgccgctgaaggagaaaatccaaaaagcccttgacgacggcacggtgttccttttcacgggcaatgcgctcgaaatcttcggcgattacattgaaaacgaggacggcagccgcgtagagtgccttgggctttatcgtttgtacgcaaagcgcaacatgatgcaccgccacaacagcgactttgagggcgaatttgacggcaatgttatcatgggctttaagacgcagttcacgatggcctacacgccggatgaatcgcacggcttgttcgtgaaaaacaaaggtgtggggctcaataaaaaggcgaaatacgagggtatccgcgtaaacaacttcttcggcacataccttgtggggccgatcttggttttgaatccgccgtttacaaagtacattttgaacctgatgggcgcgggcgatgtgaagcttgcgtttgaagcggaaaacatggcggcctacgaacagcgcaagaaggattttgccgagaaggtacactgatggtgcagcacgaaattccgccggtgttcgacaaaaacagccgcgtgctcgttttgggctcgtttccgtctgtgcagtcgagaaaagcggcgtttttctacgggcacccgcaaaaccgcttttggcgcgtcttgagcgcggttttcggtgaaccggtgccgggggatgtccccgaaaagaaggcgcttttgctaaagcataaagttgccttgtgggacgtcattgcctcgtgcgacgtaacgggctcggctgacgcgagcatcaaaaacgtcgtgccgaatgatctttccgtgattttatcgacagcgaacatcacgcatgtgtgtacaaacggtcaaatggcgcacaagctgtatcaaaaatatctggcgaaagagctcgacctgccggaaacggttctgccgagcaccagccccgcgaacgctgcgtggagcttggagcggctgacggaagcgtggaagattatccgatcaatttaatacggcaagcacgcggctttaaaaaccgcgtgcttttttcacccattttttccctctccatataataaaatcaggagggctgaaaatgaatgatattgtattttatgcgttgttggcgacgctggggacatggctcgtcacggcgcttggtgctgccacggtggtgctgtttaaatcgccgaaccccaaaattctcaatttgatgctcggcttcgctgccggggtgatgattgcggcgagcttttggtcacttttgcagccggccatcgagcgcgcggaggcggcgggaagcatgcctgcgtttttggtggcgacactcgggtttctctgcggtgcgttgttcatgtggggctccgataaatgcgtgacctacgcgcagcggcgctccgctttggcgcagggcgagaaaaacgcacggctgaaccgcatcattttactggtgctttccatcacgctgcacaacatcccggaggggctcgctgtgggcgtggcgttcggtgcgctgaaaaacggcggctatacgccggaagcgctgatgggtgccgtgacggtggccgtgggcatcggcttgcagaatttccccgaaggcgcggcggtctcgctgcctttgcgccgtgaggggtgctccagaagaaagagctttttcatcgggcaggcttccggctttgtggagccgatcgcgggcgttttgggcgctttacttgccgtgtacgtggaagccgttttgccgtttgcgctgtcctttgcggcgggcgcgatgattttagtcgcggtgcacgagctcatccccgagtgtcaacgcaaccagaaagcacagccgtatacggcgacaatgggcattgtgacaggctttgcgcttatgatgcttttggacgtgatgctggggtgaaattttgaggtagaataaaaagtccgaaacacggtttaggtgcttcggacttttgacattttgttgtgttttacgcctttgcgggttctgcggtggggacggtgagcagctttttccagcggccgctgtaatagtaaatgagcagcgggatgatgcccagaatgtagccgatcggcgcggcaaaccagatacctgtggtgccgatccagatgggcagaagcaacgagagaccgatcttgctgcacagctccacaacggaggagaccatggaaatgttgattttgcccatgcccttgacggtgctgttataaagccagatccatccgaggaacgggaagaaccacgcctgaatgcggatgaattcgagtgaatacgcgatgacttcggtctcgttcggcttgacgtacagcgagacgagcagctcagcaaaaatgagtgtcagcgcacctgcaaaaatgctcagaccgccgacaagaaggaagatttgccgcacgccaagcttgatgcgctctgcgtttttcgcgccgaagttctgcccgacatagacggaaaagccgaacgagaaattgctgaacagcatcacggcgaggttctgcacgttgctgccgacggtgaacgccgcgacgacgttggagccgtagctgttgatgacgcgcgtaatgaccatcatgccgacggaaagaaacaggctttgaagagccatttgcgcacccatgccgaatattttaaggctgacgggcatatccgggcgcagggtgtggcgcttcggcatcagatcggggtatttgcggaacatgacgaggatgcagatgacggcggagatggcctgcgagccgaccgttgcaacggcgacacccgcaacgcccatgttgagaccgatgacgctgatgaggtcgaggataacattcaaaatggagcacagaatgaggaaatacagcggtgttttgctgtcgccgagtgcgcgcaggatagatgccgcggcgttatacgcaaactgtgcgatgccgcagccgcagacaatctgaatgtataaaacggacatgtcgatgacgtcttccggcgtttttaaaagctgcatgagcggtcgcgcggcgaaaacgctgatgagacccagaacaacgccgagcaaaagggtgatccacccggaggcgacgatgcccttgcgcacgcggtcggtgtcgtttgcgccgacgtattgcgaaagcacgatggaaatggcacttgtcacgccggttgcaagcagcaggatgaggcccgttgtggacgtggtggcgccgatggcggccagcgcgtgcgagccgacgaagcggccgagcacggcggagtccaccatggaataaagcgactgaaaaatactgccgatcatcatgggcagcgcaaaacgaagcatcaggttgatcggtttgccctgcgtcatgtcgatggcaccggacggtttggacatgatacaacaactcctaaaaaagattaaggtaaaccgttccgtagaaaataagggtaaaccgcgtttgtagaacctcttcgctgcgtgttagtttacaagtatcattgtaccaagaaagcaacgcgagttcaatgaacggtttacccaaatcaacgggaaaaatatttggctatttttgctaataattaaatgttaaacgatggaataggtgaacatttcgtagtgcagcgcggtgccgatgtcgatctcctccggtaaaagcgcgcgagcgaccagaatttcatcgtgcgtgtcattgtccgttcggcgcaaaacggcgtagtcgccgtcgatgctcgccacttcgtattcgtaggggcccattataccaccgtaccttctttaacaaatgtggcggcgtgctcacgcgcggcctcgtagtcctgcgctaaaatgaggtaagctttcgtgaagcgctttgcgttcgggtcttccggctcaatggcgcgctccattaaaagaacaccgtccgcttcggagacctcgtgaaaacccatctttttgtggaatgccacggcggcatcgtttggcagattgatgtgcgctgtaacgcggcggtaatttgcatggtgcatgatgtccagcatcaggctgtataaagacgtgcccacgccgctgtgcaaacatttttcggagacgtacagctgtgcgtcggcggagaacaggtcgtctttcggaatatcgcggtcggttaaaaagcagaatcccgccgtctggttgttgatctccgtcagaatccacatacggccgtatgtataggtgtcgatgcgctgcacgtactcggcgagcgtcggcacttcggtgtcgggcgtgtagtgcgtcttttcgacgtagggtgtgtaaattttgagcatggacgggccgtcccactcgttcgttctgcgtactgcaactctgaaatcactcatgttttcagttcctttcgcttgtaacttctgcatataggggaatagacggtgcggcaccggggcgcgagaccgcaatggcagcggcttttgccgcgagggtcagcgattttttcggcgaaagcccatccagcatgccgcgcatgaaatagcccgtgaacgtatcgccggccgcggtggtatcgaccgcacggacaagctccgccggggcaaacgcgcgttcatcttctttggcgtaccacgcgcctttactgccgagcgttaagactgcggcggcgtgcgggtatttttgaaggagcttatccaaaatagcggtgggaatctttgtgccggtcagctgttcgccctccacttcgttcaaaacgaacacggaaacgagcgacagattgcactttaaaacgttttcgttcatcggggacggattgagccagatctccatgccgcgcgcatgggctttttcaagaatatacggcagcgcgctgatctcgttttgcagcagaagaatgtcgcctgcgccgaattgcgcaagcacgcggtcggcgtatgcttcatccacagccctgttggagccgccgaaaagcagaatggcgttctgtgcctctcggctgacctgaatgacggtgtgcccgcccggcatatcgcgcgtttcgatgagggaggtatctacgccgttttggttcaataaatcgcgcaggtgctcgccgtccgtgccgatgagccccgcatggcagacggaaagccccgcccgcacaagtgcaatggactgatttaaccccttgccgcccgggaacacggtgcggctttcactttgaatggtctcaccgccctgcagaatgtggtcgaccttataaacatagtctgtattgagtgagccgaaattcaagatcctcttcaaggttttgcactcctctgtttcaaaatcaatacaagaatagcacgaacaaagcccgccgtcaaggaaagcaggacaaaagaaaaaacgcaaaaacccaatatttcagcggtttcgccaaggcggaacatattcacaaaacgcgcgaaaagtggtataatatttcggttaacgagcaaaccgagtttttaatccgttttttgccgtatcccgcgcatgcaaaacggcgcggccggttttgaattttttgaagcagtttgaagttaagaacgataaagaaagggattgataaagatgggaaaaagagaaaatttgcgcaacgtagccattattgcacacgttgaccacggcaagactacccttgtggaccagcttctgcgacagagcggcgttttccgcagcaacgaagccgtaaccgagcgcgtcatggactccggtgatttggagcgtgagcgcggcattacgatcctctccaaaaacacagctgtcatgtacaatgacatcaaaatcaatattgtcgataccccgggccatgccgatttcggcggtgaggtggaacgtattctgatgatggtagacggcgttctgctgcttgtcgatgcgtttgagggatgcatgccgcagacgcgcttcgttttaaagaaggcgcttggtctcggcaaaaagccggtcgttgtcgtcaataaggtcgaccgcccgggcgcacgtccgcttgaagtcgtggacgaagtgcttgacctcttcattgagctcggtgcagacgaagaccagctcgatttcccggtggtctacgcttccgcacgtgacggctacgccatgaaccagccggacgaaaagggcacggacatgaagccgctgtttgaagccattataaacgatgttccggcgccggagggtgaccttgacggcccgacgcaggtgctgttctccaacattgactatgatgagtacgttggccgtatcggtatcggccgagtggagcgcggctccgtaaaggtcggccagaccgttaccatctgcaacagcacaagcgacgaaaagcgcaacgcgcgcattacgaagctctaccagtttgagggcctcaagcgcgtggacgcagagagcgcagagctcggcgacatcgtggccgtttccggcatggcagatctcaacatcggtgagaccgcctgcgacccggagcacgtggagccgctgccgttcgtcaagatcgacgagccgaccgtttctatgatgttcatggtcaacaattccccgtttgcgggccgcgagggcaaatatgtcacctcccgcaacctgcgcgaccgcctgtttaaagaggtcgaaacgaacgttgctatgcgcgtggaagagaccgattccgccgatacgtttaaggtatccggccgcggagagctgcacctctccattcttatcgagcagatgcgccgccagaactacgaattccaggtctcccgcccgagcgttatcttcaaggaagaaaacggcaagaagctggagccgatggagcttttgatgattgaagttccggataactacgtcggcgcggtcatggaaaagctcggcaccagaaaggcagagctgctcaacatgggtacccgcgacagcggcaccacgcaccttgaattcaagatcccgtcccgcggcatcatgggctaccgctccgagttccttacggacacgaacggcaacggcatcatgaaccacgtgttcgattgctacgagccgtataagggagatattcagcagcgcagcaccggttctctcgttgtacacgagaccggcgagtccacggcttacggcctgttctacgcacaggacagaggccgcctgtttatcgggccgggcgtaccggtttacgagggcatgattgtcggcagcaacccgaagggcgacgacatcgtcatcaacgtctgcaagaagaagcacgcgacaaacacccgtgcttccggctccgacgacgcactgaagctgaccccgcacaccgtgctctctctggagcagtccctcgagttcatcgcggacgacgagcttgtggagatcacgccgaagagcatccgcatgcgcaaaatggtgctgagcaaagagctgcgcatgaagcaggctgcgaaaaagaagtaatttataaacctgaccaacggaaaagacacacggagagccaatgaatatcgttattttggatctggagtggaacggtgcgtacagccgccgtctccacggctttatcaatgagattatcgagttcggcgctgtcaagctcgatgcacaactgaatatcacagaccggttttcctgctttgtcaaaccgcaggtgacaaaaaagatcagcgcggttatctcggacctcaccaacattacggatgcgaatcttttggacgcgcgcccgtacatgcaggtgatgagccgcttcaaaaaatgggcgggcgactgcgtaattgctacgtggggcacgtcggacattctggcgctgattgaaaactgccgctatttcggcggtggggagaccgttccgtttttgcagcgctatgtcgatttacagcagtacgtggaaaagcgccttggcgaggacggcaaggagcagcttgggctttccaaagcggcagagctgctttccatcgatgacggcgcgctcgaccaccaccgcgcgctcgacgacagcgtgctttccgccatggtgctggagcgcatttacacaaaggatacgttccgcccgttcattcaggactgcaaggacccggagttttacagacgcatcacgtttaaaacgacgtatatctgtgacgtgaacagcccgttgatcgaaaaggagcatctgcatttcacgtgcgaaaaatgcggcggcgaagcaaagcgccgcggcaaatggactgtgaaaaacaagagtctgcgcagcacattcaagtgcgaaaagtgcggctatgaattctgcggccagctgcgcgtgaagcagaagtatgagggtattatcgtgagccgcaaatccattccgctgccgaaaatcgaaaagccacgccgcgccgaaaacgcagacatcgccgatatgcgtctgacaatcaaggaaaacggtgtgggactgctgacgtttaaggcgtgggagaatatcccgtaccttacgcactgcttctccacgcgcatcggcggcgtgagtgaagaagagtttgccgctatgaacctcggcttcaaccgcggcgacagcgacgaaaatgtaaaagaaaatttccgtctcatcgctcaagcggcgaatatccctgtagagaatataacggcgggcgcgcaggatcaccacacgaacgtgcgccgtgtcacgatgaagaacgccggcacgggtatttggaagccgaaggacatggaaagcgtggatggtcttgtgacggatgagccgaatctgccgctgctcatttacgcggcggactgtgtgccgctttacttctacgaccccattcatcacgccattgggctttcgcacgccggttggcgcggcacggtgaacggcatggcgaaagctaccgtagagaaaatgcaggaggaattcgatacccgccccgaggatttgctcgcggccatcggcccgtccattgcaaaggagtgctttgaggtggacgccccgtgtgcggaggaattcctcgcgctgcctgacagcgacaaattcgtcacggacgacggcaacggcaaattccacgttgatctttgggcgtgcaaccgtgcgttcttattaggtgcaggcgtgctgcccgagcacatcacaacgggcggcgtgtgcaccatgtgcaacagcgacctgctgttttcacaccgcgtgacgcgcggcaagcgcggctctaacgccgggttcctgatgctcagggaacaaaacgcatgagcgtttgcacactgtgcccgcgaaaatgcggtgttgaccgtgaaatcatgcgcggctactgccaaagcggcgacaaaatgcacattgcgcgcgcgaagctccattactgggaggagccgcccatcagcggtacgcgcggcagtggcacgatcttttttaccggctgctcgctgcgctgcgcgttttgccaaaacagcgagatctccggtgaaagcctacacggcaaggattttacggttgaagaatttatcgagacgataaaaaaactcgaagctatgggtgcgcacaacatcaaccttgttacgccgacgcactttgcatcgcaaattgccgaagcgctgcgcatctataagccgcgcgtgcccgttgtctacaactgcggcgggtatgaatcggtcgagacgctgcgcatgttagaggggctcgtcgacatttacctgccggatttcaaatatgcggacgacgatctcgccgtgcggctttccaatgcgccgcactactgtgaaacggcgcttgctgccattcatgagatggtgcgacagacgggcgaaaatgtgtacgacggaaacggcatgctgcaaaagggtatcatcattcggcagctcattttgcctggccacacgcgcaattccatgcgggtactggaactcatcaaacagcatttcccgggcgtacccgtgagcctgatgagccagtatacgccgatgggacgtgttttgcacgagccggaatttgcggacatcaatcgccgcatcaccctgcgggagagccgcaaggtgcaaaattatatgttggaactgggtttgcccggcttctgccaaaagcgcagcgccgccggcgaacgttatataccggattttacacagtttgacacggtcaacttaggggaggaaaaatccatgcagacaacgatccagcttctttcaccgatggaaaaagtcatggcgcaggaagaaaagacctttgcgccgtacccgaaggcgagcgctctgcgcggagaagagaccgcgtttcaggccatcgtcacgggcgaaggcgagcactacattgaggtgcgaaccgatgcgcccgttaaggtgacggtgtaccgcgagggctatgtgccgtgcacgctttccgcatacccggacaggctcgatgacgactacatcacaatagagccgagcacgttcccggatgtgctgtatcccgtcacggacggcgcggtgaacgtcaacggccgcgaggtgctgtgggtgagcctcaaagtgaacgacgatgccgcgggcggcgattaccccgtggagatcagcgcaaacggcaaaagcgaaattttccgtttgacggtcgtgccggtcactttgccggagcagaagctcacgttcacgcagtggttccatggcgactgcatcgcagcgcgctacggcgtggagatttacgcaaaagagcactgggcattgttagacaagtatatgcgcatggcagcggaacacggcatgaacatgatcctgacgccggtgttcactcccgcgctcgataccgagatcggcaaagaacgcccgtgcacgcagcttgtggagattacaaagaacgacgcgggttatcattttgatttcgcaaggcttgcccgctgggtggaaaccgcaaaggactgcggcatttctaagtttgagatttcccacttcttcacacagtggggtgcaaaatgtgcgccgaatatctacgtcaccgaaaacggcgaacgcaagctgaaattcggttggcatactgcggcaaccgacccggaatacgcggcattattgcgcgcgctgctgccgcagctgcttacgttctttgaagaagcgggcgttgaaaaaagtgaccttatgttccacatttcggacgagccgagcgaggagcacaaggcggactacttaaaggcgaaagctgttgtggagccgtatttgcccggctgcattctgcgcgacgcgctctcgtcgtatgattactacacggaggggctcgtcaagcaccccgtcgtcgcgacgaatcatatcacgccgtttatcgaaaacgatgtgccggatctgtgggcgtacacctgctgtggccagtgcgtggacgtgggcaaccgtttcctcgcgatgccttcaaaccgcaatcgcattttgggcgtgcagatgtggaagtatcacatcacgggcttcctgcactggggctataacttctggaactcgcagctctccaaagcggttatcgatccgttcaaggtgacggacgcaggcggcgcgttcccgggcggcgacggattttccgtctatcccggcgaaaacggcccgctgccgtcgctgcggcaaaaggttttcgccatggcgctttatgatatgcgcgcgttgtcgctcgccgaagaaaaattcgggcgcgaaagcgtcttaaaactgctcggagacggcgaaagcatgacgtttgcaaactatccgcgcacatcgtcctatctgcctgatctgcgcgagcgcgtgaacgaagccatcgaaaatgcgtgcaaatgaattaattttttaaagactgtcgtgctgtttcggtgcggcggtctttttttctgaaatttgctctacccatatttgtcgttttgtgctatgatgaatagaaacaaggaaaggaatgaccgaaatgttaaagacttctgaaaccaccgaaaagctgctgaagtttatcgacgcttctccgtcgtgttttcatgcggtgaaaaatatatgtgtaatgttggaagatgcgggctgcattcgcctgcttgaaaacgaaacctggacgctcgaaaagggcaagcgctactttacgacgcgcaacggctcttctgttttggcgttctccgtgccggaaaactataacggcatgcagattgtctccgcacacagcgattccccgacgttccgcgtaaagagcggcgcggagatcactgtagagggtcactacaaaaagctcaacaccgaaggctacggcggcatgatcctttccacgtggtttgatcgtccgctgtcgcttgccggccgcgccgtggtgcgtaccgaaagcggcgtaaagagcgtgcttttgaacattgaccgcgacctgtgcatcatcccgagccttgccattcacatgacgcgcggcatggcggaccacaagttaaacccgcaggtcgatctgctgcccttgctcggcggcgaaaacgccgattataacgcgctcatcgcggaagaggcaggcgtcaaaaaggaagacgtcatctcgagcgatatgtttctctatccgcgccagcacggcgttgtatttggcatggagaacgaatttattgcatccccgcgcctcgacgacctccagtgcgcgttctccgcaacggaagcgtttttgaacgcggaaaacaaagaaaagctgctcatcagcgccgtgttcgataacgaagaagtcggctcgctgacaaagcagggcgcagattccacgttcctcacggataccgtgcgtcgcatcgcttccgcgctcaatatccccgaagcggagtggctgcgcaaaatgccggacagcttcatgctttccgccgataatgcccatgccgtgcacccgaactacacggaaaagtgtgaccagacgaaccgctgctacttaaacggcggcatcgtcatcaagtacagtgcaaaccagaagtatacgacggattctgtttccgccgccgtgttcggcgagatctgccgtaaggccgaggtgccggtgatgatcttccacaaccgctccgatatggcgggcggctctacgctcggcaatatctcaaacggtcatctgtcgcttaacacggtcgatatcggcattccgcagctcgcgatgcactcctgcgtggaaacggcgggtgaaaaggacaccgcgtacatggtaaaggccatgacagcgttctataatgcggatatccgccagacggcagacggcatgtatatgttttaagttgaagtcagtataactctcttgaaaggaacggatataacaatgtgggcagatgaagtggtgttttaccagatctatcccttgggctttaccggtgcgcccatgccgaacgacggcgtgtgcgtgaaccgcattcaaaaggtcaaagggtggattccgcacctgaaaaagctgcatatcggcgcggtgtatttttccccggtgtttgaatcggacaaccacggctacgatacgcgtgattttacaaaaatagactgccgcctcggcacgaatgaagacttcaaagccgtgtgcgatgcgctgcacgaaaacggcatcaaagttgtgctcgacggcgtgttcaaccacgtgggccgcggcttttttgcgttccgagacgtgcaggagaaaaagtgggactctccctataaagactggtttcacttgaatttcgacggtaacagcgcctataacgacggcttttggtacgagggctgggagggacattacgagcttgtcaagctcaatctctataatcccaccgttgtcgagtaccttttaaactgcgtcggcagatggatcgacgaattcggcatcgacggcctgcgtcttgacgtggcgtacatgttgaatgaagatttcatgcgccgcctgcgtgcgtactgcgacggcaaaaagccggagtttgtgctcatcggcgagatgattcacggcgattacaaccgcatcaccgcagacggcctgctgcacagcgtgacgaactacgagtgctacaaagggctttactctgcgttcaattcgatgaatctctttgagattgcgcattcgctcgggcggcagttcggcccggagccgtggacgctgtaccgcggcaagcacctgatgaacttcgccgataaccacgacgtaacgcgcatcgcgagcattttaaacgacgaaaagcaaatttacccgctgtacggcgtgctgttcgccatgccgggcattccgtgcctgtattacggcagcgagtggggtgcaaagggcgaaaagcatgagggcgacagcgccctgcgcccgtgcttcgatgcacccgtcgaaaatgaactcaccgcgtttatcgaaaaactcgcgaaggtgaagaccgaaagccgcgcattgaattacggagattataagaacatcaccattcagaataaaaatctgctgtttgagcgtcattgtgatcatgagacggtgtttgttgccgtcaatgcggaaaacgcgccgtgttccatagacgcccgcggcgagtacaaagcggtcgattttttaaccggcgaaacaagcgacatccacggcagggtggagctgccgccgtatggggtcaaatatttgaagctcgtataaaccgaatactttaaaaccggtgtattttttagaaaaagcagatgtgtcaccaaaatcggtagatacatctgctttttgtcgtgtttatggcatgtttatcccgccttctccatttctgtcttcaatcggtgcaaaatgcgcttttcaagccttgagatgtatgactgcgaaatgccgagtgcatcggcaacttccttttgcgtgtgctccttttgccggttcagaccgaaccgcagctccatgatctgcttttcgcgcgggtcaagcttttcaacggcacggagcagcgtttgcttttccgattcctgctcgatgccgcgattcacaatgtcggggtcgctgccgagtagatcggagagcaggagctcgttgccgtcccaatccacattcagcgggtcgtcgagcgagatctcgtttttcagctgcgccgttttgcgcaggtacatcagaatctcgttttcaatgcaccgcgaagcatacgtcgcaagcttgatgttgcgctccacgctgaacgtatttaccgctttgatgagcccgatggtgccgatggaaatgaggtcttccacattcacggcaggcgattcaaattttttcgcaatgtacacgacaagccgcaggttatgcgtgataagagggtcgcgtgcgttcggttttccgtcacggatgttctgaaaaaccacctgttcttccgctttcgtcagcggtggcggaagcgtttccgggccgtttatgtagtggcaggtgtcttcgttcagctttgataaaaagtgagcaaaaatttcgcgcatgcgggtgagaaaatcgtgtttcatgggatgtcctttccgggttttaaaccctgtatctgcgcggcgtcacacacggcggcgccgacgagcgcctgaaaactccctgcggaaagcgtgcggtcggtcacggccacccagcattcgattgatatgcccgaaagcgaagccgcatccggccgaaacgcgggcaaaacaccgtccgctccgagtgaagaaaacgggatgagccgcatagaaacagcattttccgtgctttgcattccgaaattcggcggcaatatgtcaccgagcgcacgccgatccgcaacgatggcaggcgtgccggaaaaaggctccgtcagcgtcagccccgtgtcaattttcgccggcagcgtgacggttttgccctgccgtgtgatggtcagttttgcgaaaaacacgtccggctcctttttgcgaaacaggcggtcgaagccgtacagcacgccgtaagagacgcacgtgagcaaaatgagcgtcaatgcggaaatgttaaaatacaccgcgccgtttgcgagcaaaatgccgtgtatcggcagaaaatacgccgcagccgttaaaagcccggaaagcgccgcgccaaacaaaaacagcaaaaaaacggcttttaaaagctgcgtcatcggctttggcgcaaacgctgccgcgcacagcgcaagcgattccaacagcgccagcggaaacaaaacaacccccggcagtgcgggcagcagggcagaaagcccaaacaccccgccgagcacggaagcgagcaaaagcctttttcccgtaagcggcagccgcaaaaaacgccgtaccgcgctgagcaaaagcgcgtctatgtagaggttcacgatgaaaagcaagtcggcataaacggtcacgctttcacctcccgacaccagtatacatgtgggacaaattttgattctgtcacattgtgccgccgggaaaaattttcggaaaaggcagcggaacgcgtgctgcttgcgggttttgcattgacaaaatccgcatggcctgctatgctgaaaatacttttggaggtggcgtttatatgaaccgaatttctgttttttacgagcacatggcagaagccatgaagcaggagaatattacattagatgaagtgtgcgcggcggtaaaacgctttggctttgacggtgtggagctcgacgcgaaccgcatcaaaaacgagggtgatgtaattttgcctgcgctgcaaaaatccggtctttgcgtgaacggcatttataattttttcgatttcggcagcgagacgggttccccggaaaacgaccgtgcggaatctctgcgcgtcatagactgctgcgaaaaagcaaactgcaagttcctgcttgccgtggcgggttttttgacggaggacgaaatggtgcgcggcagcgcaaagtatgaaacccgccgcctgcgcatggcggcatctttaacggagcttacagcggaagcggaaaagcacggcatcacggttgtcatggaggagttcgataaccttacggcgccgtactcccgcgccgatgagctcatgtggttcatgcggcatgtgcccggtctgcgctgtggctttgataccggtaatttcctttataatgaggaggacgcggtgaagagcttttccctgttccgtccgtacattgcgtccgtgcactgcaaagaccgcgcgtttacagaaaacaccggcagtccgtgcgtcacggtcgcaaaccgtaagctgtatcccgtggcggtaggcgacggcaatttgcccattgaaaaaatgatgcgtgttttgcttgactccggttacaccggcagctttgcggcagaacatttcggctccatagagcagctgaaatgcatggagcgctcggcggcgtttttgaagcgggtactcggggagaagtgaggctaacaatttgtaaattggagatactatggaaaatcacagaattttgattgttgaagatgatgaggctattgcgggtgcggtcagccgcatcatcgaatcttgggggcttaccccgcgctgtgtccgcgattttcgcgatgttctgcgcgaatttacggatttcgacccgcatcttgtcctcatggacatcaccctgccgttttttaatggctaccactggtgcagcgagatccgaaaaatatccgccgtgccgatcattttcgtctccagcgcgtcggaaaatatgaatattgtgatggcggtagacatgggcggcgatgattttatcgcaaagccgttcgacccctccgtgcttatggcaaaaattcgcgccgttttgcgccgcacctacgacctcggcgaccgtgtgccggtcattgagcgcggcggcgcggtcttgaacctgaacgatgagaccgtgacgcacgacggccaaaaggtgcagctcacgcgcaatgagttccgcattttacagacgcttatggaaagccgcggcaaggtcgtcagccgcgaaacgctgatgacacgcctttgggaatacgacctgtacattgaagaaaacacactgaccgtcaacatgacccgcctgcgtaagaagctttccggcatcggcctgaccgatttcatcacgacgcgcgtcggcagcggctatgtcgttttgtgaggtgacccatgaagaaaaaagaaagcgcgctgtttttctcatacctgtgcgcacacattttgcagatcgcgtttttgctgctgtgctttgccatttttgcggtgatcctctatttatacgatttgcccgccgatcccgttttgtacgcggcgctgctgtgcgcggcggtggggcttttaagctttattttaagctatctgcggttccataagcagtttcgccggttggaatcggcgcttttgaatctgcccgaatcgcgcgatgaccttccggagccctcgggcagcacggccgtgtgttatgacgaagccgtgcgcatgctgtgcgccaagctcgcccaaagtgagaccgaccgccgccgtgggcaggaggagaacaccgattatttcaccatgtgggtacaccagatcaaaacgcctatctccgccatgcgtctgatgctcggcgaagaagataccccgcgcagccgcgcactttccgcagagctgttccgcatagaccgctatgccgaaatggccttgaattacgcgcgcctaaacagcacgtcaaacgaccttgtgttcgccaaagtcgaggtcgaacccgtcataaagcgcgtcgtgcggcagtacgccgggcagtttatccgcaagcacatcgcgttaaagtgcgatattgccccggtgcaggtcttaacggacgaaaagtggttggcgttcattttgggtcagctgctcgcaaacgccgtaaaatatacggaaagcggcaccgtgaccgttaccgtcacaaaggataaggtcttaaaggtcagcgataccggcatcggcatcgcaccggaagacctgccgcgcatttttgaaaagggcttcacgggctataacggcagggcagaaaagaaatcgacgggtctcggcatgtatctgagccgccgcgccgccgatatgctcggccacacgctttccgtgcagtccgcccccggcgcaggcagcaccttttcgctcgatatgaaggaaagcaatttacaggtggagtgaccttacaaaaatgtaagctccgcctttcattttgtaaggtgaatcgatgttctgcgtccgctttttgctgtatacttttgtcaacgaattgaaaaaggagacttatttatggctgttttggaagtcaatggattgaaaaaggtatacaccacgcggttcggcggcagccgcgtgcaggcgctcacgaatgtcacatttgccgtggagcgcggcgagtatgtcgccatcatgggcgagtccggctccggcaaaacgacgctcttaaatatcctggcggcgcttgaccgtcctacggagggtgaggtgttcttaaacggccgcgcactctcaaccatcggcgaaaaagagattgcttcgttccgccgccagaacctcggatttgtttttcaggatttcaacctgcttgataccttcaccctgcaggataatatttttctgccgctcgttttggcgggcaagcatttcccggagatgcaggcgaagcttctgccgctcgcgcagcagctcggcattgcagatctgctccagaagtacccgtacgaggtttccggcggccagaagcagcgcgccgccgtggcgcgtgcactcatcacctcaccgcagattctccttgcggatgaacccaccggcgcactcgattcccgcgcgtccgacagccttttatcgctctttggcgagattaaccgcgccggtcagacgattttgatggtcacgcactccactaaggccgcaagccacgccggccgcgtactgttcatcaaggacggcgttgtgttccaccaaatttaccgcggtggttccacaaatgaagagatgttccaccgtatttcggataccctcaccgccatggcggcaggcgcgtaacgggagggcacgaaaatgaataacttatatgtgcgcttggcggcgcagaacatcaaaaagcaccgccgcagctacgtgccgtttatgctggcgggcgtttttgtggcagcggtcagctacattttaaattcgctttccaataatacggagctcggtcccacgtcgcaaatgatgttcacgctcggcagcaccgtcgtcatgctgtttgccgttatatttttgttttacacgaacagctttttgatgaagcagcgtaaaaaagaactcggtctctataatgtgctcggcatgaataaaggccacattgcccgcgtcatcgggttggaaacgcttttcacggcgcttatcgttattgtaggcggctgcgccgtcggcattttgcttgataagctcacatttctcatcgttgccaaaatgatacgcatcacgccgaattacggctttcacatcataccgaaaagcctgcagtacgttgctgttgtgttcggtgtaatctacgttttgatttacatctcgaatgtgtttcgtgtgcgcatttcgcgccccatagagcttctgcacggcacgaacgtcggcgagcgcgagccgaagacgaaagcgtttatggctattctcggcgtgctgtgcctcggctccggctatgcgctttccattctgtcttcccgtgagcctgtcctcgccatctccctgtttttcgttgccgtcctcctcgtcattatcggcacgtatttcctgttcacggcgggcagcatcgcgcttttaaagcttttgcgccgcaataaaaattattattacaaaacaagccacttcatcagtgtttccggcatgctgtaccgcatgaagcaaaacgccgtcggccttgcaaatatctgcattctctccaccatggtgctcgtcattttgtcctccacctgctcgctgtggtttggcgccgaggatatgatccacacacgctacccggcagatgttctggtgagtatggaagacccgaaccacatggtcgacatggacacctttctgaccgatgagctgaaaagtgttccgggcggcagctatacgtcctatgaattcctgaccggctacgattccacagaagaaaccgaagaccattcctctgcaatcttcatgaaagacggcaccgcgcaggtcgactccatcacgcgtaacgtgctgtttttttccgcagagacctataaccgcatcacaggcgaaaacgtgaccgtggaaccgggcacggcgctttatatgagtgtagacggcgtacctatgccggacaccatgacatttgcgggcacgacgtatacgcttttacccacgccgaagtcctttaacctgcgcggcagatatcacgcttacgtctcaaagccgtatgtcgttgttctgccggattatgcggaaaaaagtcaagtcgtcacgcccaccgagtactactgtatctcgctcggcaaactgagagatgaggaacaacagacgttttacgatgcgatcctcgaagacgttacgaccatcatgccggacgaagaaagcgtattctgggacgaagacggatacttcaattttgagtgccgtgtcgaaaatacgaaggatattcgcggcatgtacggcagcttcctctttatgggcatctcgctcggctttgtatttaccatggcggccgtgctcatcatttactataagcagatttccgaaggtatggaggataagaaccgctttgccatcatgcagcaggtcggcctcagccaaaaggaagtaaagcactctatccatacgcagattttgaccgttttcttcctgccgctcatcacggccggcatccacgtgatgttcgcgtaccccatcatccgcgctattctgcgcgctatgatgctcagctccgaaacggtgtttattacctgcaccgtcgcgtcgttcctcgtattctccgtgctctatgcggtcgtctatgccctcaccgcaaaggtgtattaccgcatcatcagcgaagacaacaaatagagattacaagatttattcctgcaaaaagccctccgcatcccgaaaaatcggaaagcggagggctttgcaatttttgtttgaagattaaacgttgaagcggaacagaacgatgtcgccgtcctgcatcacatactccttgccttcgctgcgtacaaggcctttttctttcgcggccgccatggtgccgcatgccatcagatcgtcaaatgcaatgacctcggcacggatgaagccgcgctcgaaatcgctgtgaattttgcccgcagcctgcggggccttcgtgcccttcttaatcgtccaggcgcgtacctcgggcttgccggcggtcaggtaggagatgagaccgagcagggagtagcacgcgttgatgaggcggtcaaggccggattcggtcagacccatgtcggcgaggaaaagttccttttcctccgggttcatgccggagatttcggcttcgatctccgcgcagatcggcagcacagcagcgtgctgctcgtcggcgatcttcttcacggcgagatagccggggttgttttcaatgccgtttgcaaagtcggattcgctcatgttggcggcgaaaatgatgggcttgttcgtcagcaggttgacggaagcgagcagctcggcttcctcttcgtcacacgccacgctgcgggcgggctttccggcatccagcgcctcgtgtacgcgctcaaagaactccagctcgctctgatacttcttgtccgccttgatcatctttttcgtcttgtcaatgcggcggtcgagcacctcgatgtcggagagaatcagctcaaggtcgattgtctcaatgtcgcgggtcgggtcgatggagccctcgacgtgaataatgtcgtcgttttcgaagcagcgcaccacatgaaccaccgcgtccacctcgcggatgttggagagaaacttgttgccgaggccctcgcccttcgacgcgcccttcacaagacccgcaatgtccacaaactcgatcgtcgccggggtgaacttttccggctcgtacatttctgccagcttatcgaggcgcttgtccggcacggcaacaacgcccacgttcggctcaatggtacagaacgggtagttcgcagactgcgcccccgcattcgtgatcgcattaaaaagtgtgctcttgccgacgttcggcagaccgacgatacctaatttcatttttcgttttacctgtccgaaaacccgcattttatttggattttcgcctttcgctgaatttcttttacgccctttctacgcccttttttgtaactggcggcgtagtttgctgaaacaggcgcaccgcatttgccagtgattcgtccgtaacatgaacatacctgtccatggtggttttaatgcttgcgtgttttgcacgtcaaacctttgagatttttgcccatttatcggactcctttcttattcttaaaaagagtccaacgcagttacatattatagcataaggactctgctttttcaatctcaacgggaatttttcggggcttttgcggctaaaagctctatatgaccagtttatggcggatatattcttcaaattcacgccgcttcacgagcttccgcgtcccgacaaaaagcacgaacgggcaattcggctgcttcagcatggcatctattttgtttattccgatgctgctgtactccgccgcttcttttatcgtcagtgtcattttaaggtggatcggcacatgtgcttcggcttgcgcacatgtcggcgttacggctcctttgcagtgaagatcacatgtgaagtttcgttctttgtcgctcatagtggtgtttcctcctgttctgcggatgcacgaaagatggtcatttcggtatgtaacctgccaaacggtcgggagcgagccgacaccacgggagtttcaccccaactgacggtctgtcagagccattctcattgcctgcggcaccatcggagtggcggtctcttaggtgctcggactgtgactgaacgggagtatcattatgctctttgcgggtcatagcggaaccgggagctgcccggtatttggagtcggcaaggcagtattgctgcctctgattcgctcgctgaaaagcaggtcatggcgcaccgctttgcacgctcgccgcaaagagaacgtatttgacaagtggatattcagttttcaaggttcaaaagagaaacggtgcagccgtttcgggggacgcaaaatcaaaacgcaccgcggaaaaaatacccttcactatacacgacatttttcggcgatttataaacgggggaaagccgtttgtttataaattgtttacaattagaagcttatcgggttatcatcacaataaaaatgaaaaaggctttattaaagtaatgagggcatccctcggctaagggataccctcaaaatcactcttgcttttcttatttacataactttagctgcgcttgatttcacgcttcttgatactagaatataaatagtacaagccaaaatgagaaattccaaatacacataagcatggtacaatagagacaagctgaaggaggatctcatatggcaaagcaacacgacaaacaatttaaacttgatgcggtccagtgctataaggatcacaaagatctcggagtacgtggatgtgcagaaaatcttggcatcggatacagcacattaacaaaatggctgaaagacttccgtgaatcaggtgatattcctgttcgtggttctggtaattatgcatctgacgagcagaaggaaattgcccgtctcaggcgtgaattacgtgatgcccaagatgcacttgatgtgttaaaaaagcaatcgacattctgggaaaatgacggacgccatttaccttgaagtgtctgagaagacggaagctgccaaaaaggccggacgccgggtttctgtctccggaatgttgaaaatttcaggtgtctttcgctcaggatatcttgcatggctccaccacgtaattataaaatatccttgatgaacagtttaatcctgatcgtccgaatgctgtctggtgttcggatattacctacatataaaacagcacacactaaggcggagctgctggcaggttgaatttggaagaaatttctcattttaacttgtactgaatcttgacataggaccaaacatgtgataaaattactgaaatttaaaggagggtcctttttttctatgtctgtttttcacggacttgcgcaacctctgtacagatgcaatagtattgtcacagtgagcaatgtctcacatattgaacgaaaaaacaggaggaaaaattcatgacaaagttatactatcagtttccaaacacctggttcggcgactgcatgccttttggaaaaggagatcagttttatctgtttcaccaaagagataccagaaaaccctgcccgtttggcgaaccctttggctgggatctggcggtgacttctgattttgtgcactatgaggataaagggacagcgctcccgcggggaaccgacgaggagcaggatcagtttatttttgcaggaagcgtttttgaagcagagggaaagtatcacattttctataccggattcaaccgggactatccaaagctgggcaaggcatcccaggtgctgatgcatgcggcgagcgatgatctgctgaactggaccaagacccaggacaagctgacttttacaccgcaggagggttatgacccagatgactggcgggatcccttcgtgatctggaatgaggaaaaacaggaatacctgctggttttgggaaccagaaaggccggacccaaggaacagcagaccggacgtaccgtaaagtttacctccaaagacctgaaaaattggaaatttgagggagatttctgggcaccgggcctgtttaccatgcatgaaatgccggatctgttccagatcggtgactggtggtatcacattatttccgaatacagcgacggaaataagatggtgtaccggatgagcaaaagtctggatggtccctggatcgctcctgcggacgatgcttttgatggacgtgcttactatgcgggcagaaccttctgcctgaacgggcagcgcattctgtttggctgggttcccacgaaagaggactgcgatgaccgtggaaacttcgagtgggcaggcacatttgtggcacatgaggtgtatcagagagaggacggaaccctgggcgtcaggatccccgacactgtatggaacgcctttgatgagggagagaaagctgaagatatagtgatcgataccccttatgccagacaggaacagatacttttcaatgatactacagacctattccgctttgaagcggatgtggaattttccgaaggcacccgctcttttggacttcgcttttatgaaaacgaagagaccggtcagagctatcagtatttatttaatatagaagataaccgttaccgctttgaaacgagtcccaacatgccctggcctgcaaaccagaacattggactggaacggcccatcagactggaagcaggaaagaagtaccatatccaaatgatcctggatgacaccatcgcaacgatctatgtggacggagtgactctgaatacacggttttatcagaaatttggccagtccctcagtctgtttgtgacagacggaacgctgacagtaacaaatgcaggcttgtcaaaaaccataaaatgaatagtgattgacattcccccaaaagtattataatctgatatcagataccaacttgtcgaaaaagtccagtggaagctgggctttttctcgtagatatggtggtcctatgtcaagatttagtacaagttaaaatgagaaatttctcccaaattcaacctgccagcagctccgccgtaatgtgtgctcttttatatactcgctcgaattcatctggtgacataaagtcgcaatgactgtgaattgtggaactgctttttctctcaaaatgagagaaaagctaattattcaattttgatccggtatccagaaagccgggtacatatcacaagctgctgcgttttcctttacttattgttttagaaagtttataaatcgtataacgctgaagtaagcagaaagggttcagggatttccctgataagtgtcgttgtggtatcacaacggcgatgcttgcaatataattatttcggcgacaggatagtatttttgaataaacatggttttctcttttctttgtaaatttaactgtggtaaattaaaaattcttttctagttgctcagttcctaaggtataatgaaggggatcggtctgacgaggcgatgcatgagctgctatgctcgtccagcaaactgtcagccgcctctcattgtatcgttcgatttatgcaggttgaattaaaggagtcaactcccacattcgcataacaacgcaagctgaatcggcactgagtaacagcggtcaccgaacatgattaggaggttgaaatccatgacaaacaacatcatcacagctgtcggaattgacgtctccaaagggaaaagtatgattgccatacggcacccgggtggagaggttttgcgtattcaccgcacggaacagcccaaacaacaaaaattaaaaacaatcgccgcaacacactctctttttcgggtagtacaggaagtaacagggggtgaggtgtggagagggggagtgagctttcgcagccatttcgctcctgcaaaagggcagaatttccctaaggcgtcccgttatctttttttgattgtgtcaatacagcgaatattggttacaaaattcaagtgcccggaacaccgaattcatacccaaaacataaaaacagcgtttctattctttcctttttagaaagttagaaacgctgcttttataatacaccgatttactgtgtagataatgtcaaatggctcttaatcgcagaattttgaaggcgtatcataaacaaattaaaatgcgttggactctgttttttaatatcaaatctacgcccatttctacgcccaaatgacatgaaattgtgtgattttatatagaattatatgttggtgaaattccagaaaacgcagtaatcatgcgggtttacggatttatatgaaagtatatggatatatgaaaaaggtcggtctgcaacgatacctaatttcatctataaaaccatctttctttgaatgtagtcatgatgtaaactcatacataatcagtatagcatattccccctgcgcctgcaagaaaattctgtgatttacatgggaaagtttttttaaaatctgttgtggataaaatcaccatatcacgcccatgcagtagaaagcaaaagaaaatcatgttgcttcaagacgaactgtttttatagaatgaataaaattatatcaacaaaagtctagatactattgacaaataccttgctaatcagtatccttaaaacaagagttatcgtatattaaaccgatactttacagtttggggtgaagttaaatgaaacggattttgtccatggaattaaaaaaagcgttttggaaccagagatttttattttctttatcagtcgctctttttttgtctttattaagcggctttttacaaattcggggatacatcatcagaacaaggtttctaaatacaccggcataccaaaatgttgctgactggggaaaagactaccacctcagcgccgagaccatggcagatttctggattggcatggatttttcaacctggtgcgccacggcatttttctttttactaccattgctggctgttttaccttatggcagttcgctccaccgggaatataaaagcgggtatcttaatttgatcacgccgcagatttcccagaagcgctattttgcggcaaagtttttggcgtcgtttctgtccggcggcgcagtgattgtttttcctatgatcatcaacgtagtttttgtcgcctgtatggtgccgatgcgtctgccgtccgtactagaagtgatctataacggcgtatacggatttgggctatgggcggaggttttttatacgcacccggttctttacattctgctctatctcttgctggattttctctttgccggcgcgattgccacaattcccatggcactttacaaactgaaaaacagaggactggtcttaattcttccgtttctcacgctaatggtttttcacattttcctttccctgctttatcggttcattcctttctgcctgtcgcctctcgatttccttcgcgcggtaaatgtttctccgtatggcgcaaatttgtggatcgtagccgcagagtttatactgcttcttcttccggggatgctcaccgttttggcttggagaaaaaaagatgttttatagaatttttgctttagatgtaaggcgatccttactcggcagatggaaaagattttcggttgcactgctcttttttgttttggtgacttttgcgtgtaaaatcagcttttcaaacgcatacctgcaaagcccgcagctttctccttttgcggcgcttacgttaggtgattttctgctctatgcctttggcggctgtgacggcgtccgcagcgcaagtttatttgggtttgacagaccgtttgctattccttttcaatggcttttactgattttacttgccatatatattaactttgacttgactgaggaaagctctgcgggcgtgaatgtacaattacttcttcgtgccggtgataaaaagcaatattggttatcgaaaattctgtgtattactatcagcacaagtttgtattttatgctgggtgtgattgtgacacttgggtgcggttttgccttgggtggagtttcttctttagaaatagataagttaattttaaacgtgatgaacctttcttctatggttcctcgagaagccaccagccccgcttttattccgaccttgttgatggtatggtttgccattctaacgatcacgttgcttcagcagcttatttcactattcatcaaaccgattggaagttttttagtcatggctgtatttttgtttctgtctgcctattttatgaaaccttttttctttggcaattatgccatgatgattcgaaatgccctcctttgtgagggcggagtcgatgcggcggaaggcattttgattttgtcgcttgtcagtttagcatcgatagtggggggctgcgtcgtttacgaccgcaaggatattttaggcaagggggaatcctgatgtttcttgaagtgaaaaacgttacaaagtctatacacggcgatgttgtgatcaaaaacgtgtccctttgctccgagcgcgggcgtgtgatcggcctacgtggaataaatggttccggcaaaacgatgctgatgcgcctaatcagtggattgatccgccccacgaaaggacaggttttgatcgacggagaagtcgtatcgaaagacataccgtttccgagatccttaggcgtgctgattgaagggccggcctttttggacgattattccgctatggataacctgaaactcatcgcatatcccaaaggaaaagtgacagaggatgagatcaaggctgttttatcggaagtgaggctggatccgaaaagccgcaaaaaatacaaaaagttttctttgggcatgaagcagcgcctcggcattgcggcggcggttatggagcacccggatttgattctgctcgatgaacccacaaatgcgctggatgaatccggcgttgacatgctgggggacatcgtgaaaaaagaaaaagaccgcggcgcggtcttgatcgtttcctcgcacgatcgggatattctggaggatatatccgatgaaatttacgatttagagcagggagagatcgttcggcacagcataaagggggagaagcgaagtgaaggctaagaaaatcttactatgcgcagccagtctggttttgcttctgctcatcgtcgtgcgcatcgtccatgtgaataccaatgtgttgacgatcccggaagagcgctatgcgcaaaaccagtgggtagagctgaacggtgcctttcaggaaatggatgatgaaaacacggagggctactctgtaagaatacttggtgcggaacagctgacctacaatgaatttctggaaaaatacggcgcgtcggaaaatcccccggagggaaaggatgatatagagactgtgctcgatgtagagtatgaatttcgcaatgtaggcaattcagacggctacctcctgctgatccaatacatgattgcagggccgtactattctctgattttcgattcgaccttgtggtctgtatgcacgccgaccggcgagggacaactcgcgaccgccttgcaggaagataccacgtattcctttcatgttccgtacatttttgccggcggtttttctaaagacttagaaggtgaaaagctcgccgcagtcgtttcacgcatccctgtcaaaaaaatgattgaatttacgttgtaatctgctttataaataaacaaaaagaaaacgggcttctgccgaattgccgcggcgggcccgttcctttatgtgtgaacttgcgatgtgtgcaatcttgttctcttatgcgttttcctgttctgcgagttttctgcccatgagcacgcccatgcaagaggccatcatcaggccgcgcgtccatccgctggcgtcgccaaggcagtgcaggttgtgaatgcttgtgttgaggtccgtgtccatcttcacgcggttgctgtaaaacttcagctccggcgaatagagcagcgtctccacggcggcgaagcccgggacgacgtgatcgaccgcctgaatgaagttgatgatattcaccatggcgcggtacggcatggcagaggtgatgtcgcccgccaccgcgtccggcagagaggggcgcaggttcgagcgcgaaagctctttctgccacgtgcgcttgccgtccagaatgtcgccgtagcgctgcaccagaatgtgccccgcgcccagcatgttcgtcagctcgcccaccttctgtgcgtattcgatcggctgattgaacggctcgttgaagttgtgggagcacaaaatggcgaggttcgtgttatcggattttttatctttataggaatggccgttcacgacggcaaggttgttatcgtaattttcctggctgacaaagccgcccgggttctggcagaatgtgcgcaccttgtttttaaacggcttcgggtagccgatgagcttcgattcatacagaacgttgtttacggtttccatgacctcgttgcgcacctctacgcgcacgccgatgtccactgtgcccggcgcatgggcgatgccgtggcgggcgcagagcttgtcaaaccaatccgcgccgcgtcggccggctgccacaacggtctgcttcgcgtaaacgtcgtattcgttctgaccctccgcaacgtgcacgccgatgcaggtgtcgttcttcaaaatgaggtcgctgcacgcgcagccgaagcgaatctccacgccgttattcagaagatattgctcaatcgcgtaataaatctcttgcgccttctccgtgccgaggtgacggatggggcagtcgacgagcttcaggccggtctggatggcacgcttgcgaatttctttgacggcttccttttcgctcacgccctccacgcgcgtgtccgcgccgaactccagatagatggaatccgtgtattcaataagcgactgtacggcgtcttcgccgatcagctgaggcaggtcgccgccaacctccgggctgagggacaacttgccgtccgaaaacgcgcctgcgccggaaaagcctgttgtaatatggcagtacggcttgcagttcatgcagcggccggtctgggccttgggacatttgcgcgtttcaatggaacggcctttttccagcagcagaattttctccttgctgccgcggcgcagaagctccatcgcggtaaaaatgccggcaggaccggcgccgataatgacaatatccgtgttcatgtttgaccccaactttctaaaactaacagatgaatttgcgtatgaatttcaaaatacaactctatgcaagacccggtttcgggtaaatcggcacataaaaaggccgccctgtgcccgaacgtatacacgaagcccgtaagcggcttcggtatagtcggcacacaaggcggccggtagagacattcacccaagtcgtgaatttatatgaccgatcagcaattcagaattatagcagctaattaaacttctgtcaagcttttttgcgcataaaaatgcaggcttttgcaaaatatcttgcaaatttacttatttgatgaacttctcgccgtcgtaaatgaagatgcccgcgcccgcgccggtctttttgccgtccagaagccatcttttaaaacagcggcgctgggtggtgtcctccggcagctcgctgttcggcttttcaaagtcctttgcgaacacacgccacttgtcgtggaacacatcgtattcctcgctgtcgtaaatatagaagtcaccgatgaaatcgaccatattgagcgtctcgggcagaatttcgcggttcttcgggaacaaaagccaggagtggcagcagaataccatcggcttgccatcgaggtcttttttgtaaaattcgtaggcttttttataagattcgatgcgcgccgcgcggttcaaagaaccgcaggacggaatgtgcatgttgtaaaccgtgtcaccgggctttaccgtgtaaccgccgaccgttacgggcgtgtcgccggagaagtgtacggcctcatactgcaaacggcccagcttaaagcggtgcatcgtgtagaaccacgggtaccagcttgcgacgaatgtgccccaaatgccgtatacgtcgtggcactcgatgagcttgaatttcaggtcggcgatggtgtcccagaacagctcgtccgtcaggcccgccgctctgtaattttcgcgcagacgttcgcttgcaagcgcaaggaacagaaaatccaccacgtggcggtgcagccctgtccgctccgaaagcgcgtccatgtgcggcacaatgggcttccattccgcgccgtatgcgccgtcaatgccgtaatctttaaagagcagcgtctcggcagagaccagctcgtcaatcgcgccgggtgtcgtcacgagcgtctcgcagttctcgcgcagagaagcgcggctcgcttccggcagatcaaggttttcaataaagcaatttaaataatcgagtgtgtacatacagatcctcccaaagtagcgtttttccatagaaacgcgtatatctcattctatcatttgtatatgcgcggcgcaatggactttttgcacagcagaacacacccgtttttgtaggaacggtgcacagcacctgtttttgcacggttttctccgctaacgctcaaaatacaatcacctttttatcacattttgtaagtaaaatttaagaaacaaaacaaagaggagggtgaaagccatggcggactataccggcgtatttgagcgcgtagagcaaaaatatctgctcgattccttacagtttgagtcgctctgggcggttttggagccgtatatgcgccccgatgaatacgggcgctccaccatatgcaacatttactttgacaccccgaattatttgctggcgcgactttcgggcgaaaagcccgtctataaagaaaagctgcgtttgcgtacctacggcgtgccgaaagcggaaagcccgtcgtttgtggaactgaagaaaaaatatcagggcattgtctacaagcgccgcatcgtgatgccctacggcgaagcgtatgattggctcgtaaacggcaaagcgccgaaagagaacagccagattgcaaaagagattgcatggtcactgcactattacggcgatttaaagtccgccatggcgctgtgctatgaccgcgtggcactttacagccgcgaagacagcggcctgcgcatcacattcgatacaaacatacgctttagagaagaaaataccgacctgcgtcagggcgacgatgggcaactgcttttagagcccggcgaaacgctgatggaaatcaaagccggcggcggtctccccacatggctcaccgatatgctgagccgctttagaatttaccccgcgtcgttttccaaatatgccagtgcctataacacccacggcacgcacatcgtgcatgcgtcctaaataattcatttgatttcagaaaggatattcccatggaaaccatgtttgcaagcttcacctcgtccggtatcaccgtatcttcgtttttgatttgctctctcgtcgcgctgctttgcggggcactcatcgcgtttacgtatacgcgccgcacgcgctttacgcaaagccttgtgctcgctgtcattttgctgccgtttgccgtgcagaccgtcattatgctcgtcaacggtaacgtcggcacgggcgttgcggtcgccggcgcgttcggccttgtccgtttccgctccgcacccggtaacgccaaagacatctccgtcatcttcgttgccatggccgtgggtctcgcctgcggcagcggctatatcgcgctctccgtgctcttcacggtcattgcgtgcgccgtgctgtatctgctcgtcttcttccatatcggtgcagaccgcagcggcgaaaaagagctcagcatcaccatccctgaatcgctcgattacaccgaggtgttcgacgatattttcaaagaatacaccacccacgcagagcttacggaagtcaagaccgcaagcctcggcagcctctataagctgcactattgtgtgcgccttgcggacgaccgcaacgaaaaagaatttctcgatgcgcttcgctgccgcaacggcaatctcgaagtgcgctgcggccagccgcacactcccgtggaacagctgtaaagaaaggagccttcctttatgaaaccgaatcgtttatccacgaaaaaacacaccctgcgctttgctgtcattctctccgcactgatcttagcgggttgcgcctccacacagacgtccacatcgtctacgtccgtatcttccgcttcctctaccgtgagcacggtcagcacctctgaggaaagcggtgcagacgagaccgattctaccggcggcgcgatgaacggcaccatcgactccgtcatcgaagcaaatctttccttcaaaaataaggatttctacatcgattacagtacggaagacaccgtgaagatcgacctttccgcgccaaaggaagcagacggcgttaaggtttccggcagcacggtcaccattacggaagcgggcacgtatgtcctcagcggcacgctcacggacggccaaattatcatcgatgccggcgacgaggatgatgtgcgccttgtgctcgaaaacgcgagcatcacctgcacaacgaccgcgcctatctacgcgaaaaacgccgataaagtcattatcagcctgcccgaaaacaccgaaagcaccgtgaccgataccgtcaccggcacggacggcaacgatgagcttaccgccgcgattttcgccaaatgtgacctttccgttaacggcacgggcacgctgaacgtcaacgctaacgcaaatgacggcatcacgagcgaagataaattgacaatcaccggcggcgttttgaatatcacttcggcagacgacggcctcgtcggcaaagacgctgtgctcattaaggacggcaccgtccatatcacggcttccggcaacggcatcaagtccaccaaatccgaggccgataaaggctatgtctatatcggcgggggcactgtgaacatcaccgccgagcaggacggcattcaggcggagaccagtgttctcatttccgcgggcgaagtaaatgtcaccgcaggcggcggcgcgaatggagagcaaaaaacgggcaatgctatgtttggcggcgcacagagtacaacgacggatgaaaccttgtctacaaagggcatcaaggccgaagccgcgctcgacatcaccggcggcaccgtcacggtcgattccgcagacgacagcctgcacagcaacgattcgatgaccgtttcgggcggcggtatcaccgtaaagtccggcgacgacggcctgcacgcagataacacccttacgatcgaggacggcaccatcgtggtggaagagtcctgcgagggccttgaagccatcgacctcaccatcaacggcggtacgatcgatgtcaccgcaagcgacgacggtctgaatgctgcgggcagctccgttgacggcggctttggcaccgtgggtgcagatacgatcaccgtcaacggcggcacgctcaccgtaaacgcctccggcgacgggctcgattcaaacggtgcgcttacgattaacggcggtacggtgtacgtcagcggccccaccggtgacggtaacggcacatttgactgcgacggtgtgtttaccataaacggcggcgttgtgctcggcacaggcagctccggcatgctgaagacccccacaacggattccaaacagaacacgattagcgtcagctgcaccggcagcgcggatgacacagtagaagtgaagggcgcggacggcaacacgctcgtttccgccgtggctccgaagagctttacgaatgtcatgttcagcacgccggacatcaccgagggcgaaacgtatacagtctatgtaaacggtacagaagccgcgagcgagacctgctccggcgttgtcagcggcgctacgggtatgggcagctttggcggcggccccggcaatatgggaggcaaaatgccgagcggcgatagtggcatgaccccgccgaacggtaacggcggcacgcctccgcagatgccgggtaacacctccgatacctgattttcccgattttccctcgctttactgtgcgtcaaaatatgaacttttcgtaacaatttcggctttttcgcaaaaaaccgcacaccttttgtcagggcgaaaaggaacctgtcaattcccgtcgaaaacgcgcgaacgattctatttgaactttcaagacccccttgctataatggcattactgacagatttaccacccatccgacagcctccgctctaaaagtacagcggggctgccgggccggatcaggaaggatgagagattttgagtgaacaggaattgatgctgcgcgtagcagcaaaacacggcgtagacggtgaaacggtccgcgaggagattggcaaagcccttcgcacggcgaagaattcttcaaatgccgcggcccgcgcgttttggagtgccatccccgaagatgccagcgacaaagagatcgtgcagtgcatcgccgccctcttgttgggtagcgccgtgcaggagcaaaactgaacagcattatccccatcaactcaaaaaacacggtgcagccgaaatgaagctgcaccgtgtttttgttgttttgcaaaatcacagaaataaaggtcgcgcttttggctcggcttaaaacgaccggttcgtgccttgtcacgatatcctctatctttttctcggtctcctgtccgcgaatgacgaagtaagagtttactttattactcttgcccttacaaccggtgaaagtgccgccagcttttcgcgcacgtcctccgtcacgtcgcccgtaacgtccaaaatggtgtatgcccagtcgccacgcgatttcgagagcatgttctcaatgttgatgcccgcttcaccgcacacctgtgtgaacgaaccgatggtatttggaatgtttctgtgcgcaaggcaaatgcgtgtgtccgcgccgcgtgccatggaaatattcgggaagttgacggcattttggatgttgccgttttcaatgtaatccttcagctcctctgcggccatcacagcgcagttatcctcgctttccggcgtggaagcgccaaggtgcgggatcgcgatgacgttttcgaccccgagcagcgcgtcatccgggaagtccgtcgcatacgcggcaacggtgccgtctgcaagcgccgtcaacatcgcgtcggtatcgacgagcgccccgcgcgagaagtttaagacgcgcacaccttttttcacttttttcaaagcgtccgcgcctatgagtccgcgtgtcgagtcatttagcggtacatgtattgtaatgtaatcgcacttttcaaaaatctcatccacggaagcggccttcacaatgtcgctcgaaaggttccatgcagcgtccacggaaaggaacgggtcgaagccgtatacctgcatgccgagcgtctgtgcggcgttcgcaacgagcacgccgatcgcgccaagaccaatcacgcccagctttttgccgagaatttccggccccgcaaacgcggattttcctttttccacctgcttcgaaatgtctgccgtgccttttagtgtctgcgcccattcgatcgccgggacaatctttctcgacgtcaaaagcagtgccgccagcaccagctccttcacggcgttggcgttcgcgccgggtgtgttgaatactacaatgccggcttccgcgcacttttccacgggaatgttgttcacgcccgcgcctgccctcgcgattgcaagcaggctattgggcaattccatgtcgtgcatggcggcagagcgcactaaaatgccctccgggttctcaatttcggcagcgtatgtatagtttttgcccaaacggtcggtgccgagcgggctgatcttattgaggcaaagtatgttgtgcatcaggcattctccttttcaaagttctccataaactgaacaagcttctccacgccctcgcgcggcatcgcgttatagatagacgcgcgcatgccgcccacgctgcggtggcccttcagattcacaaagcccacagcggcagcttcctgcacgaattttgcgtctaaatccttgtcgcccgtcacaaatgtcacgttcataatggaacggctttctttttcggcgcagcccttaaaaagctttgagcggtcgaggaaatcatagagcagcgcggccttttccacgttgcgtttttccatcgccttcagaccgcctacttcgtttttcagccattccaaaacgagcttgcacatgtaaatggagtagcacggcggcgtgttgtacatgctgtcgctttccgcgtgcgtcttatacatgaacatcgtcggcgttttttcctgcggctcgccgatgagatcctcgcggatgatgacaatggtcaggcctgccggggctacatttttctgcgcgcccgcatacaaaacgccaaatctcgaaacatcgatcggtcggctcagaatgcaggaggaaatgtccgccacaagcggcacgtcacccgtctccggcagcgcatggaacaccgtgccgtagattgtattgttcatgcagatatggaagtagtccgcgtccgggcggaactccttcgggtcaaggtcgggaatgcggctgaaattctgctctttcgaggatgccaccactttgcaatcgccaaagcgcgcggcttccttatacgcttttgtggagaactggccggagagcacatagtcggccttgcggtttttcgtcatcagattcagcggcaccatcgcaaactgcgaggaagcgccgccctgcaaaaagagcaccttgtagttatccgggatctccatcacctcgcgcagaaggctttccgcgcccttgatgatcgcgtcatagaccttagatcggtgtgacatctccatcacggactggcctgatccttcatagtcgagcatttcggcagcggctctcagaagaacgctttccggcagcatagaggggccggcagagaagttgtacacacggttcatagtaagatcttcctttctttggcgcgttaaatcgcaccggataataaaatagatttgccttgctttaccgcagtttcttatagcaccgcggtaaagtttcccctattatacatacggcaaaacgcaaatgtcaagcacaaatttgtttttggaataaaaacaggtgtatctaatcggtggacaaatatcgaatgctgcatttcgttcgtgccccatgcacaaatacaaataaattgtccaccttctgctgacaaatccgcatttttcggccgcaaggcaaaaaacgcggcaaaaaaacactttaaaaactatctaaaagtacagaacatcttccataacggattgattttttggaaatctttttgtataataacagaatacaaggacactttaggctcaaaaagagcaaacagacccgtgtccgaactcggcgaaagggtgaagctttcatgaaggtacagaatattgtcaacattttaaaggcggaaatactggcggagggcgaccttcaggaagaggtcaaaaccgcatgcggcagcgatatgatgagcgacgtgctggcgttcgtcaaggatcagtccgtgctgctcacgggccttgtcaatccgcaggtggtacgcacggcggaaatgatggatatgcactgcatcatctttgtgcgcggcaagcgcccggatgagaccgtgttgtcgctcgcacggcaaaaggacatcaccatcctcgcaacgccgtacagaatgttcacagcgtgcggcctcctatacgaaaaaggattagaaggcgggtgtgatgtatcatgagtatgctgcaacttcggtattcagtccccggcgatgattttacccgcgcgggcgaagcttcgggcgatgtaaagcataaattaaagaaactcggctataacccatctgccattcgccgcgtttccatcgccatgtacgagggtgaaatcaacatggttatccatgcgggcggcggcgaagccaatgtggacgtggacccggataaggttgtcatcgtgctcaccgaccacggtcccggcatcgcagacgtggaaaaagccatgcaggagggctggtccaccgcgccggataacgtgcggtcgcttggttttggcgccggcatgggcctgccgaacatgaagaagtattccgacgaaatgacgattgattcggtcgtggggcagggcaccacgctcaaaatggtcgtttacgcgcagagcgaaaaatcgtaagctctgcataggataatggaggaggcgcgttagattgggtatttttttccactcggtcacgctcgatgaaagcaagtgcgtaggctgcacaaactgcatcaagcgctgcccaacggaagccattcgcgtgcgcagcggcaaagcggtcatcatgagcgagcgctgtatcgattgcggagagtgcatccgcatctgcccgcaccacgcaaagcgtgcaaagcatgaccatctttccatgctggaaaagtttacatataaaatcgcgctgcccgcaccgtctctttacgggcagtttaataatttggacgatcaggattatgttttatccggccttaaaaagcttgggttcgatgacgtcatggaggtctccggcgcggcagagcttgtcagcgaggctacccgccgtctgatggatgccggcaccttgcagcgccccgtcatcagctcggcttgcccggctgtcgtgcgtttaatccgcgtccgcttcccggatctctgcgaccacgttctgccgcttttgtcgcccatggagactgcggcaaggattgcaaagcagcaggccatgcagaaaacgggtctgccgaaagagcagatcggctgctttttcatcacgccgtgtcccgcaaaggttacggatattcgcatgcccatcggcatcgaaaagtcggaagtagacggcgccatcgccatcagcgaaattttcccgcagctttcaagccgcatggataagctcacgccaaaagatctcgaatcgctctcaaattccggcattatcggtgtcagctgggcgacctccggcggcgaatcctcggcgctgttaaaagaaaaatatctcgctgcggacggcatcgaaaacgtcatccgcgttttggaggagattgaagacgaacgcatcggcgagctggatttcatcgagctcaacgcctgctccggcggctgcgtcggcggcgtgctatgcgtcgaaaatccgtatgttgccattgcaagattgcaaagattgcgcaaatatctgcccgtctcgcagaatcacttggagaaaaacaaaaccgtcccggaggaaatgaactggggcagcgggctggagttttccaatgttttaacgctttcggaggatatttcccgcgccatggaaatgatgatggagatcgacaaggtggaagcggagctgccggggctcgattgcggcgcatgcggtgcaccgagctgccgcgcctttgcggaggacaccgtgcgcggaagctgccgcaaggaagactgcgtgttcatcctgcgcaaggagatccgccgttttgcggattcgctctcaaatttagaccttgacggcggcaaacgcacaaatgatgacgaatagggggaagtaaaatgcagataggggaaatggccgaagcactcggctggaagcttttgaccgaaaatacagatataacgcgcgaagtaaagggctgctactgcggcgatcttttaagctgggtcatgggcagagccaaagcggacgacgcgtggcttaccgtcatgggcaacgtcaacgccatcgcggtcgcatcgcttgccgataccgcaggcatcatccttgtagaagatgccgttttggatgcagatgccaaagcgcgtgccgagcagcagaaaatcgccgtgtacggtacatccctgcctgcctttgaaaccgcgctcaaaatcgcttcattactggggtgaatgtatgaacagctatcggtacgacctgcacctgcactcgtgcctttctccgtgcggcgatacggacatgacgccgaacaacctcgtcaacatggcggcgctgctcggctgcgacatcatcgcgcttacggatcacaatacctgccgcaatacgcccgccgctgtaaaggtggggcaggccgcggacgtgctcgtcattcccggtatggaactctgcaccgccgaagaagcacacgtcgtctgtctgtttgaaacggtcgaggacgcgctcgcgtttgataaatacgtctgtgcgcacattccaaaggtgccgaaccgcccggaaattttcggcgagcagtgggtcttaaacgaaaacgacgagaagatcggcgaaatttccgagcttctcatcaccgcgacagacatcagcatcaacgacgtgcaggcgctcgtgaaaaagtttaacggcgtggcgtttcccgcgcatgtcgataaagacgcgtacagcgtcactgcgtcgctcggtgctatcccgccggaagcgcagttttccgcagcagagctgtcccttactgccgatgccgcacagcagcggcttctgcacccggagctcgaaagtatgatgcttctgcgcagctctgacgcgcattacctgcatttgatgcccgaagaacaccaaacggtggagctgccggaaaaaaccgccaaagcgcttttagatgtgctgcgtgggtgcggtgcaggtaaatttcaagttttataagaaaaaaacgtcaagctgtgtgctatgcgaatttcgcataacgcacagctttcgtcatttttaccaacatggctaaatcaccgaattttcgttaaattgcataaaatttcgttaatctcactcttttgaaaattagctgcttctaacttttgtaactcgggttaaaacggaatagatatacttttatcgatataaaatatcgataaaatgagtgatatttcaaccttttcacggcaaatctatactgtttttgtatactttaacaaatgcccgaaaacgaaatttttgtgctgtacgctaaaagaactgacaaaaatttcgtcatgggtttgacaaactttcatttttaattcttttttagaattattatgtatgtcgattttgatataattcataaagatgtatgaaagctctccgcccaataggggcgcagaccgaaccatacctgaatttaaacttaattttatcagggaggaaataaaatgcaaaagcgtatcagtaccattccgtttaccgatactcccgagcagcatgagaagctcctcgcagtcatcgagagcctcaagaatgaaaagggcgccgtcatggctgcactgcacaaggcgcaggatatctacggctacctgccgatcgaagtgcagaaggagattgcacgcggccttgatgtatctctcgaagaggtctacggcgtctccacgttctattctcagttctcgctcactccgaagggtaagtacaacatttccatttgcctcggcaccgcatgctacgttaagggcgcagataaggttctcgaccgtctcgttgcaaagctcggcatccagccggaggaatgtacgccggacggcgtgttctcgctcaccgcatgtcgctgcatcggcgcctgcggccttgcaccggtcctcaccgtcaacgaagacgtttatggccgtctcgttcccgaggacgtggataagatccttgcaaaatacacagcgtaagccatgcgtgagctttcgctgaatgtgatggacattgtgcagaactccgttcgcgcgggcgcatcgcttgtcacggtgcaggtcgcggaatcgaaaaagcacgacaccttaaccatcacgataacggataacggctgcggcatgagtgcggagcaggtcaaaagcgtcatcgatccgtttttcaccacacgcaccacccgcaaggttgggcttggcgtgccgcttttcaaaatggaagcggaaatgacgggcggctcgtttcagattgattccgaagaggggaagggcaccaaagtcacggctgtgtttcgtccctcgcatgtcgatatgatccccctcggggacatcgcgtccgttatccatcttttgatcacctgcaatcccgaactcgattttctctttacccacagcgttgaagaaaaagagatcaccctcgatacccgtacgctgcgcgagcagctggagggcgttccgtttacggagcccgcggtatcggcgtggattcgggagtatcttgcagaggcggaggaagagcttaagtagctctcgtagtatcaatgcgcaaggcgcagaaaggaaaagccacatgaaatcattagctgaacttcaggcaattcgagatagagcaaaaatggcggtcaacgtccgcgaaaattccgaagcgaaaacgcgtgttctggtcggcatggctacctgcggcatcgcagcaggcgcaagaccggttctcaccaccatctcggatgaggtcaacaaacgcgagcttcacgacgtcctggtcacgcagacgggctgcatcggcatctgccagttcgagccgatcgtcgaagttatcgatgaaaacggcaccaagactacatacgtaaaaatgacaccggaaaaggcactgcgcgttgtcaacgatcacatcgtcaacggcaatgtcgttacggaatacaccatcggtgcaaatcagaaataaggaggtaaaactatgtttcgttccaatgttctggtctgcggcggtacgggctgcacgtcctcgaacagcgaaaagatcattgaaaagctgaaggaggaaatcagcgccaaaggtctggatcaggaagtcaacgttgttcgtaccggctgcttcggcctgtgcgcactcggcccgatcatgatcgtatacccggagggcgcgttctatagccgcgtcaccccggaagatgtcccggaaattgttgaagagcacctgctcaagggacgtatcgttcgccgcctgctctacaaggagacggtcgtcgacgaaagcaccacaaaatcccttaacgagaccacgttctacgcaaagcagatgcgtgtcgcactgcgcaactgcggcgtgatcaacccggagcagatcgatgagtacatcgcgctcgacggctatcaggcaatcggcaagattctcacggagaagatcccgccccagcaggtcattcagaccatgctcgattccggtctccgcggccgtggcggtgcaggcttccccaccggtcttaagtggaaattcgcagcggcaaacgatgccgatcagaaatatgtatgttgtaacgccgacgagggcgacccgggcgcattcatggaccgttccattctggaaggcgacccgcacagcgtcatcgaagccatgaccatcgccggttacgccatcggcgcaacgcagggctacatctacatccgtgcagagtaccccatcgcggttcaccgtctccagattgccatcaaccaggcaagagaatatggcctgctcggcaagaatatcttcgattccggctttgatttcgaccttgagattcgcctcggcgccggcgcattcgtgtgcggcgaagagactgcgcttatgacctccatcgaaggtaagcgcggcgagccgagatgccgcccgccgttcccggcactcagaggtctgttccagaagccgaccgttctgaataacgttgagacgtatgccaacatcccgcagatcttcctcaaggggccgcagtggttccgcagcatcggcacagagaagagcgcgggcaccaaggtgttcgcactcggcggcaagattaacaataccggccttgttgaggttccgatgggtaccaccctgcgtgaagttgtcgaagaaatcggcggcggcatcccgggcggccacaagttcaaggctgcacagaccggcggtccttccggcggctgcatcccggcgtccctcatcgatacacctatcgattacgacagccttatcgccatcggctccatgatgggctccggcggcctcattgttatggatgaaacgacctgcatggtcgatatcgcaaagttcttccttgagttcacggtcgatgaatcctgcggcaagtgcaccccgtgccgtgtcggcacgaagcgcctgcttgagatcctcaacaagattacaagcggcaagggcacactcgaagacatcgataagcttgaagagctctgctactacattaaggaaaactccctctgcggtctcggccagacagcgccgaacccggttctttccacactcaagtattaccgtgatgagtacattgcgcacgtcaccgagcatcgctgcccggcaggtgcctgcaaggccctcacgaattacgtcatcgatgcggacaagtgcaagggctgcacgctctgcgcacgcaactgcccggtcggcgccatctccggcaccgtccgcgagccgcatgtcatcgatacgcagaagtgcatcaagtgcggcgtctgccgtgaaaagtgcaagttcggcgccatcgaaaagaagtaaggaaggaagttgagaatagcatggatatggtaaatattaagatcaacggcatgtcctacgaggtcgctgccggcagcacgatcctcgaagccgcaagagaagccggaatcgacattcccaccctttgcttcttgaaggacgtcaaccagatcggcgcatgccgtatgtgcatggtcgaagtcaagggcgcaagatcgcttgtcgccgcctgcgtgtacccggtaaacgagggcatggaggtcttcaccaatacgccgaaggttcagaaatccagaaaaatgacactggagctcttgctctccgtgcatgaccgcaaatgtctctcctgcaagagaagcggcacctgcgagctgcagaagctctgcaacgatatgggcatcgacagcgagaaccgctacgaaggcgccgttcccgccggcaaaaaggattacagcaccctgcacctcgaaagagataatgcaaagtgtatcctgtgccgccgctgcgtggcagcctgccagcagcagcacgtcgccgtcatcggcgcgaacaaccgtggtttcgataccgagatcggctgcgcatttgagatgccgctcagcgaagtggcctgcgtttcctgcggtcagtgtatcgtagcctgcccgacaggtgctctcaccgaaaaagacaatacccagcaggtcatcgatgccatcaacgatccggaaaaggtcgttgtcgtgcagacggctccggctgtgcgcgcagcgctcggcgaagagttcggtatgccgatcggtacgaacgtagaaggcaagatggtcgcagccctgcgccgccttggcttcgataaggtctacgataccgatttcggtgccgatatgaccatcatggaagaagcaaacgagttcattgaccgcgtgaagaacggcggcaagctgccgatcatcacctcctgctctccgggctgggtcaagttctgcgagcactacttcccgagcctcacagaaaacctctccacctgcaagtccccgcagcagatgaccggtgcgctcatcaaaacgtggtttgcggaaagagaaggcatcgatccgaacaacatcgtttccgtttccgtcatgccgtgcgtcgcgaagaaattcgagatcaaccgtgacgacgaagacgcagccggtgtgccggacgttgatatctccattaccacccgcgagcttgcccgcatgatcaagatggcacagctcaactttgcaagactgccggaagaggattttgacccggttatgggcgtttccaccggcgcagctacgatcttcggcgcgacgggcggcgttctggaagcagcgctccgtaccgcagccgatgtgcttgagggcgtcgaccacgataacatcgagtataaagagattcgcggcacgaagggcttcaaggaagctgtttacaaggttgccggcatggatgtcaaggtcgctgtcgtcagcggtctgaataacgcaaacgagctgctcaagaagatcgaaagcggcgaagccgactaccacatcgtggaagtcatgtgttgcccgggcggttgcgtaaacggcggcggccagccgattcagccgtctacggttcgcagcttcacggacattaaggccctgcgtgcaaaagccctctacgatgaggacgcggccaagacgctcagaaagagccacctgaaccccgtcgtcaaggagtgctacgaatggatgggcggcgagcccggctgccataaggcacacgagctgctgcatacgtcttacgtcaagcgcgatcgtttctaaatttaaatttaaggtgtttaagagccactgcgagtaatcacagtggctctttttatgtcggctccctctgacagagggaaaggaagtgatacagcgtgctaatgaacttcacggtacctttcacttagaaaaaaactgtgtatataaaaagagcggcgcaaagccgctctttcagggaacccatgcaacggggttccctacaatttgaacgtcccccggacgttcaaatctaccttcctagttttgagttaggcaaaagtattccgaactctgcggagttcggcttagggctcagccctaagaatccgcgaccttttttgaaaaaaggtcgatcaaaaacttttaacccacgttttgcgtcatcactgtgctaccttctccaacagcttgcaaatatccatggctgcattttgattgataactgctctctgccgtttgcgcatttcttctgcatttcccggctccgaaagcctttccaccgccgacaaaagctctgtttctgtgttttccacctttacggcgataccctccttggcaaaaaactccgcgttgcggctttcgcaccccggtatcggtgaaatgtgcacaagcggcacgcccgccgcggcgctctccgtagatgaaagtccgcccggcttcgagataaatacgtcgcttgcctttaaatacagtgccattttgttcgtgctgtgcatcggcgtgatttgcccattttttgcaaattcagcctccacgctgtcaaacagcgcctcattgctgccgcacaaaatgttgaggtcgcagtttgcattttgcttcaaatacggcagcagtgcccgcacggcatttatgattgaccccgcgcccatgctcccgccggaaagcagcaacgtgcgcctgtctttcggcaagttaagcgcttcccgcgctctgtctttcgtgatggtatcatcggaaaaatccagccgcaccgggatgcccagcggccgcaatttttccgcaggaatgcctcgcccggtgaaatcgctgctcaaaagcggggagggcgtcacgtacaaatcgcagtccgattcctccgtaaacggaacgcaagtgtagtccgtcgcaataaacacaaacggcggcgtttccatgccgtttagccgcatgtgcgtcaaaatctccgtcgggtacaaatgcgtgcagacgatcacgtccgttaggtgttccgcaaggtatttctgcatgtacggcgccattttgccgttgatgtggtacaccggcgaacgtcccggcagcttacggtacgcgttaccgaggtcatagaccgcgccaaacagcttcgggcttttctgtaccaactttatataggtctgcccgactttatttgcaagctcctcgctcaccagcgtgtacgggtccatgcgcacggcgtgatgcccgcgttccgtcagcgcctcaaaaaccgcttgcgccgccgtgttgtgcccgccgcccgtgctgcaggacagaatcagtgcttccatgcaagtttcacctcaaagtgttctttttcctcggcactcataaagagcttcgcgagcaccgaagccgcaatcagcaaaaagccgaagacgatatagcggtttggctccatccaaaccgtgcaaatggccgccagaatatacgtcgccactgtgcggtaatagttcgggttaattttaacaacgcacgaaaagaaaatgaagatgcccgccaaaacgcacagagggatccagtgcggcagcagccccaaaaagcacccaaacgttgccgcaatgcctttgccgccgtgtttaatgtcataaaacggcagaatatggcccaaaaccggcgccgccatcacaaaagagagcatcagcgggttttcgggcagttctccgctgcggtacaaaaagaccggaaaaaagccctttaacaggtcgccgcacaacgtaaacacgccgcaccggaacccgccgtatgtaaacgcattcattgtgcccgggttcttgtccgggctttccgccataatgtctgtctttttaaagatcagcccaccgagccgcgcaaacaaaatactgcccaacagatacccgaaaataatatataaagcgtcgcgcacttccatgtttttctcacactccccaaaaatttcgcgccacaaaaaattcacaattttgccgagagtctcgtcttgacaacctcttataaagtcattataatatgaaccattgacacttgtcaatttgacatttgtccaagttgagctaaaatattgacgaaacaggagggaatgtctatgtatcagggaaaaaatccaacggcgctgcaatcgcagaacctcatcacagaggcacttttagcacttatggaggaagagccgtttcaaaaaatcacgataaaagccgtttgtgcccacgccggcgtttcacgccagacgttttactcgctgtttgaaaataaggaagaggtcattgggcgtcggctcgaccagctttttgaagaataccgtaaacggttcattgcggaaaagcgcgcttacaccattcgcagtctatgtgattctattatggagtgttttgtggagcaaaaaaaactcctcagtcttctggtcgaaaatcatctggatacattggctcgcgaaaaatcggaagcgtatctcctgcatttggacaatattttccacgcttatgaccacgaagaccgtgattacgccatttcatttcttgccggcgcgatcatcagcatggtggtttatgctattcgcaaggatgattttacggatagccgcaaaatttcgaatcttgtgcaaaagatcatcaccggccaatattttacaatttaaatccgaaaactcctataacaaaaaccgctcgggctttacggcttcgagcggttttatattacaagaaagattatttgtggtagaggttattgtcctcatacgttgcttcgcacgtcacgttgatgccaaggcgtttgaatacgctgtcgtctaccgtgccgaggattacgctggagtgcaaatcacagccgttcagctcgtccagcttctgcatggcgcgcatcgcgttctcgtcggtcgccgcgctgatggcgagcgccaccaacatctcatcggtgtgcaagcgcgggtttcggctctgcatgtagtcggttttcagcgtctgaataggcgcaatgaccgtcggcgagatgagcttcacctcgtgcggaatgcctgcaagcatcttcaaagcgttcagtgtcaacgcagaggaagcacccagcaattccgatgtgcgccccgtcacaatcgtgccgtccggcagctctaaagctgccgcgggctgtcctgtcgcttccgcgcgcttcaatgctgcgagtacgaccgggcggttctccggctccaacttcagctggcgcatcaggttctcgattttctgtaattccgcttcggaagcaagaccttggcgcacaaggcacgccgtcttaaagtagcggcgaataatctcctgcttcgaggcttcgcggcacacttcatcgtcgatgatggacagacccgccatgttcacgcccatgtccgtcgggctcgcgtacgggcactcgccgtaaatctgctcaaacatcgcacgcagcacggggtagatttcaatgtcgcggttgtagtttacagtcgtctcgccgtacgcctcaaggtggaacgggtcgatcatgttcatatcattcaggtcagccgtcgccgcttcataggcaaggttcaccggatgctttaagggaaggttccaaatggggaaggtctcaaacttcgcgtagcccgccttaatgccgcgtttgtgctcgtggtaaagttgcgaaaggcaggttgccattttgccgctgcccgggcccggcgccgtcaccacaacaagggagcgcgtcgtctcaatgtaatcgttgcggccgtagccctcgtcgcttacgatgagcttcacgtcggaggggtaccctggaatgcggtactggcggtaaaccttcagccccagtgtcttcatgcgctgctcaaaaatcgccgcggagggctggtctgcgtactgcgtcagcgtgatgctgcccacatataagccgaagccgcggaaaatatcaatcaaacggatgacatccgtgtcatacgtaatgccaaggtcgctgcggcgcttgtttttctcaatgtcgttcgcgttgatcgcaatgacaatctccgcctggtctttcagtgccaaaagcatcttgatcttgttgtccggttcaaagcccggcagcacgcgtgaagcgtggaaatcgtcaaacagcttgccgccgaattccagatacagcttgccgccgaactggtcaatgcgctcgcgaatacgtgcagactgcagctcgatatacttctgactgtcaaaaccgattttcttcatggtcattccccttccttaattcatacgtctcatgcgtcctaaaataagcccctttagggtgcatttgaaaagccgtaaacttgttttccgatacaccccgaatacagtaaaaaagcgggcgttcggtatctgcccgcgaaaaatctgtttttagtatagcaaaaaatgcggtttttttcaatagtaaatcttggtttgcgctgcctaatttcggtcctcttccgcgcggaatattgacagtatcttcaaaaagtggtatactgtttgttaaatcgaagtttaattttaacggcggtacatggagacacttttcatgagcgagcagaagcgaaacacaacgaaaaaccaaatatgccttgggcttttggcgcatgtcgatgccggcaagaccacactttcggaagcgatgctgtatgaaggcgggcagctccgccgtctcgggcgcgtcgatcatcaggacgcgtttctcgataccgacgtgcaggagcgcgagcgcggcatcaccattttctcaaagcaggctgttttaccgctcgaacataccgcgtttacgctgctcgatacccccggtcacgtcgatttttccagcgaaatggagcgcacgcttcaggtgctcgattacgctgtgctcgtcatcagcggcacagacggtgtgcagagccacacgcgtacgctgtggcggcttttggagcgctataacgtccccacgttcctcttcatcaacaaaatggatctcgacggcgcagaccacgataaagtcttagccgagctgcaaaaactcagcaccggttgcgtcgatttcacatctcccgaagcggaacgcgatgaaaacatcgccgtttgtgacgaagacacgctcgcccattacctcgaaacgggcgaagtcgaatgtcccgagattaaacgcctcatcaaaaatcgcaagctttttccgtgctggttcggctcggctttgaagttagacggcgtaaaagaacttctaaacggtcttgaaatgtacaccgaaatgcccgaataccctaaggctttcggcgcgaaggtcttcaaaatcgcacacgataatcagggcgcacggcttacgtatttgaaggtcacaggcggcgctttgcccgttaaaatggtgcttaaaggcggcgcgggcgaaaacgtatgggcagaaaaagccgaccagctccgcatctattccggtggaaaattccgccttgcggaggaagtcaccgcgggcggcgtgtgcgccgtaacgggcctcacgcacacgtatcccgggcagggcctcggtgcggaggaagacacccccgcgcccgtgcttgaaagctttttgacgtaccaggtcttcctgccggacggtatggagccgcataccgccgtgcgctgtttgcgcgttttggaggaagaagacccccagcttcatgtcgtgtggaacgagcaattacacgaaattcacgtgcagattatgggcgcggtgcagcttgaagttttgcagcgtgtcttaaaagagcgctttaaaatggaggtcacgttcggcaccggcagcattgtctaccgcgagacgatcgaagaacccgtcgaaggcatgggacattttgagcccttgcgccattacgccgaggtgcacctgctcttagagcccggcgagcgcggcagcggtatgcgtttcagcaccgtgtgcagcatggatgtgcttgaccgcaactggcagaatctcattttaacgcaccttgaggagcgcagctaccccggcgtgctgaccggctcgcccatcacggatatgaaaatcacgcttctcatcggccgtgcgcatttaaagcacactgagggcggcgatttccgtcaagccacctatcgcgccgtgcgccacggcttattacaggcgaaaagcgtgcttttagagccgtggtacgatttccgattagaggttccgcagtcgcaggtcggccgcgccatttcggacatgcagcgcctttgcgcggagttcgagccgccgcagaccgagggggaaaacgccgtcatcacgggctttgcgcccgtctccgaaatgcagggttacaccttggaggtcgcatcgtacacacgcgggcttggcagccttatttgtatgccgaagggctacttgccgtgccataatgccgaagaggtcatcgagcagatcggctacgatgccgagcgtgatttggagaacaccggcgattccgtcttctgttcgcacggctccggcttcgtcgttccgtggcgcgaggccgcctcccacatgcacctcgaaagcggctggaagcccgaaaagccgaaaacaaaatctaccgaagccgaagctcccgtgcgcgccgccgcacagctgccgcctgtgttcgacgatgagctgcgcgccatttttgagcgcacctacggccctatccgacgccgcgatatgcagccgcaaaacgccgtccgcgccgccgaaagcagcggaaaaggggaatggaaggtgccggaaaaggtcttcgagcctgagtatctcctcatcgacggctacaatattctctttgcgtgggacgatttaaataaggtcgccgaaaaggacatcgacaccgctcgacagattttaatggataaaatctgcaattatcagagcttcagccgcagcacgtgcatcctcgttttcgatgcctatcgcgtcccgcgtgacgtggaggacgttatccgctaccacaacatttccgttgtgttcacaaagcaggcggaaacggcagatacctacattgagcgcgccacgtttgagatcggcaaaaagcaccgtgtgcgcgtcgccacatccgacggcgcagagcagatgatcgtactcggtcacggcgcgcgtcgtgttacggcctccgaattcaaggtggaggttgatgaagcgaacaagcgcatgcgcgaggtcatcgccgattggaacgaaaaagaaagcgcccgccacgcgcataagccgttccaaaatttaacggatcaagcgcggagtaatctgcgtgcgtatacagaaaacaacaaaacacaaagaaaggaagatggaaaatgaaagtcttactcttaaacggcagcccgaaggcgaacggcaatactgccgtcgctctgcatgaaatggtggatattttcaacaaagaaggcatcgaaacggaagttattcatgtcggcaacaaagatatccgaggatgtgtggcatgcgggcaatgttctaagctggggcactgcgtttttaacgatcttgtcaacgaagttgcgccgaaatttgcggaagcggacggtcttgtcgtcggcagtccggtgtattatgcctctgcaaacgcgacacttgtcgcgtttttgacgcgcctgttttacagcactccattcgataaaacgatgaaagtcggcgccgccgttgtggctgcccgccgcggcggcctttccgccacgtttgacgaactcaacaaattctttacgatctccggcatgcccgtcgcgtccagtcagtattggaacagcattcacggcggagcaccaggcgaggcgaaagaggatttggagggtctgcaaaccatgcgcaccttggcgagaaatatgacttttttgatgaagagcattgcgctcggtaaggaaaaattcggcctgccggaaacggaacagcgcatcgcaacgaactttattcggtaaaaaatactgctaaagcagcaaagaagcacagttaagcgacaaagagcatctttgctgatttttcaatatcttctattaaaaatataaatttatccgcaaaatggcaaaaatctcccatggcaaaaagccaagggagattttgtttatagatcaacttttaatatatttaagtttatttccactcgcctgttccggcttcgacgtagcgggacttctcaaatacggagatcatcaaggtcggctcggtcgtgccgagatcggaatatgtaagccccagcgccgtgccactgcttttatcctgccattcgagatattgagtgccgataccgttgtcgtcttgaacggcaggtgcgccgaaggtttcggtgaagcgtttgcttgcggcttcaaaatgctcttctgccgtgccgcgcgcaagctgttcgtggaacgttaccgaaaacagcttgccgttttcgtcaaactgcgcatcaaatttgccggagcagtctgcggactgcacgatgtcctccgataaataattcgtatatgcgaaaggcgctgtcgcggggctttcgctgaccattgtcagcttagagccgatagcggattcaagttccgtcgtgtcgatgccgaacggcgcagtggaatacgcatagccggtcttggaatcgaatcggaaagcgtctgtctctttcacggttgtcttagacgaacagccgacaaacgtgaacatcaaaacaagggacaaaaccaatgcgagctttttcataaaacgacctcctatgatgatgttaggatttgtggttgcgctgacggatacggcggtgaaaatgaatttgtgttatgaattgagcttaaaatttttgctaaaaaatatcacctccaagtatatctttttagtaacatattacacttgtatgataccgtgtatatgcgggtttgtcaatatatatttaaaagttgttagaagaaaaacagaacaaaaaatctccctctgtgccgaaacacaaagggagacttcgttataccgatttagttttgaagatccgaattagagaatgatgctcttgcctgtcatttcttccggctgcggcagatccatgatcttcagcatggtgggtgcgatgtccgcgagaacgccgccctcacgcagcttgcacggataaccgacaacgcagaacggaaccgggtttgtggtgtgtgcggtaaacggttcaccgtcgtcatcaaccatcttgtctgcattgccgtggtcggcggtgatgagcagcacgccgcccatctcgtcgatggctgctgtgaccttgccgacgcaggtatcgacagcctcaacggcagcctttgcagcctcgaacacgccggtgtggccgaccatgtcgcagtttgcaaagttcagaatgatcatatcgtacttgccggacttgacggcctcaaccatcttatccgtgacttcgtaagcactcatttccggctggaggtcatacgttgcgaccttcggggacttgacaaggatgcggtcctcacccggatactgcttctcgacgccgccgttgaagaagaatgtgacatgcgcatacttctcggtttcggcaatgcgaagctgcttgaggcccttatcggagacgtactcgccgagggtgtttttaaggctctgcggcttgaatgcgatctcaacgttcggcatcgtggcgtcatactgcgtcatgcagacgtaggtgagcgggaagaagccgttcttgcgggtgaagccggtgaaatccgggtctacaaacgtgcgggtgatctctcttgcgcggtccgggcggaagttgaagaacacgacggaatcgccggatgcgaccggagcgccgcccttgatgacgcacggcacgacgaactcgtccgtgacttcgttttcataggatttcgatacagcgcaaaccgggcacgcgaactcttcgccttcgcggcaaaccatggcgttgtaagccttttctacgcgctcccaacggttgtcgcggtccatcgcatagtagcggcccatgaccgttgcaaccttgccgacaccgatttccttcatcttctccatgagctccttgacgaagtccttgccggaggaaggcggaacatcgcggccgtcgagcagggcgtgaacatagacgttttcaacgcccatcttttttgccatttccagcagaccgtagaggtgctggttgtggctgtgcacgccgccgttggaaagcaggccgatgaggtgcagcgcggtgccgttttcttttgcgttattcatggcgtgtacgagcgcttcgttctcaaagaaagaaccgtcctgtaccgccttcgtgatgcgggtaagctcctgataaacgatgcggcctgcgccgatgttggtgtggccgacttcgctgttgcccatctggccgtccggcagaccgacgtccatgccggaagcgccgatctttgtgatcgggttttcagagaacagcttatcgaggttcggtttcttagcggcggcaatcgcgttgccctccgttttagcaattccgaaaccgtccagaatcatgagtacaacaggtcttttcatagtggagatgcctttcctttcaactggaaaaaatctttcggtggaaaaatcagcccttggtggctgcgtctacgatggctgcgaagtcgttcggcttcagggaagcgccgccgatgaggccgccgtcaacgtccggctgtgcaagaagctcagctgcgttgcctgcgttcatggagccgccgtactgaacggtgatgccttccgcagccttttcgccgtagagggacttgacggtcgcacggatgacagcgcaaacctcgtttgcctgctctgccgtagcggtcttaccggtaccgatagcccagaccggctcgtaagcgatgatgatgcgcttaagctcttcttcggttacgccgccgagtgcgatctttgtctgcaaggcaacgagctcatcggtgatgccctgctcgcgctgctcaagatattcgcctacgcaaacgatgacggtaaggcctgcatcgagcgcagctcttgttctcttctgaaccgtaacgtcggtatcgccgaagtaggttcttctctcgctgtggccggtgatgacgtactcaacgccgcaagccttcagcatttctgcggaaatctcgccggtgaaagcgccgcttaccgcccagtggcagttctctgcgccgatcttgatgttggtgcccttagccgcctcaatagcggttgcgatgtctacatacggcacgcaagcgacaacgtcgcagcctgcgtccttaacgagcggagcaatggcggtgatgagttcctttgcctccgcaggggttttgttcattttccagttgccggcgataacagcctttctaacagccttgttcatgattttctattcctttccgtcggttaaaaaccgtttttattgagacaacaatacgggagcagaggcaagctccgctcccgttcatgcttttaattatttctcgttgaggcaagcaatgccggggagctcaagaccctcgaggaattcgagagaagcgccgccgcccgtggagatgtgcgtcatcttatccgcgaagccgagcttctcaacagccgcagcggagtcgccgccgccgataatggagattgcgttgctgtctgcaacagcctttgcaaccgcgatggtgccgtttgcgaagttttcccactcggaaacgcccatcgggccgttccaaacaacggtgcctgcgttcttcacggcgtttgcgaacagctcacggctcttcgggccgatatcgagacccatccagccttccggaatgtcgtcggaatcgacgatcttccactcggagtctgcactgtactcggttgcaacaacgttatcgaccgggatgaggaagttgatgcccttagcctttgccttgtccatcatttccttagcgagctcaaccttgtcgtcctcgcagatggaggtgccaatctcgtgaccgagagccttgaagaaggtgtaagccatgccgccgccgatgatgagtgtgtcgaccttttcaatcaggttgttgatgacgccgatcttatcggaaaccttagcgccgccgaggattgcaacgaacggacgcttcgggttctcgagtgcgccgcccatgatggaaatctccttctggatgaggtagccgcagacagccgggaggtaatctgcaacgcctgctgtggaagcatgtgcacggtgtgcggtgccgaatgcatcgttgacatagatctcagccatggaagcgagtgccttagcgaaatccgggtcgttctttgtctcttctgcgtggaagcgaacgttctcgagcatgaggacttcgccgtccttcagagctgcagccttagccttagcgtccgggcctacaacgtcttttgccatgatgacttccttgccgaggagcttggagagctctgctgcgacaggcgccagggagaatttcttcacgtcgcccttagcagcttcgagtgccttagcggtcgcttcagcctgctctgcctccggcatagcgtcgatctttttcttctccttcttgtcgagctttacaacgtcgttgaagatgttgtgcgggcgacccatgtgggagcagagaatgacctttgcgttgtggtctacgagatacttaacggtgggcagcgcaccgacgatgcgctttgtgtccgtgatgacaccgtccttcatcgggacgttgaaatcgcagcggacaagaacgtgcttaccggcaacgtcgatgtcttctacggttttcttgttgaggtagttcattttcgtacactcctttaagaaatatattgagttacggttatacgtttggttggcggacaacaccgcctacggaatttattttataccaaacggaagatgatttcaagagataacgcgcaaattgcacactttttagcgcaaatttttcatttttgcgattttgtacgggtttttatttcgcaccgttcgcgtctgccgcgtcccagtcgtagccgcgcaggcgaccggcttcggaaagcgcgggaaaatcccactggcgcaggacttcgtaaacgccgatggcgatgctgttggagaggtttaagctgcgcgcttccgaaatcatggggatgcgcacgcagcggtctttgtttttgaaaagcaggtcttccggcaggccggctgtctctttgccgaagaagaggtagcaattatcgggatagtgtatatccgtgtgcttatggacggattttgtggagaaaaagaaaaattcgccgctgttttttgcaaaaaattcgtcgagcgagtcataataggtgatgtcgagcaaatgccagtaatcgagaccggcgcgctttagctttttgtcgtcgatcttaaagcccatggggcccacaaggtgcagccttgcgcccgtggcggcgcaggtgcgcgcgacgttgccggcgttttgggggatctccggctcgaccataacgatattcaaaaccattgctgtcaaagtcctttcgggaagaatgatgtatgtttttgtaaaaagggggaaactaaacgtgacggctgttttgtatgttttaaaagccgcaatctggatctggaggtttgatgccatgtataagcagagcatgaacgttgtgaagggcgtgggtctcggcattgccgcaggcgctgccgtggctgccgtttcgtccgcgatgatgaacggcgggaagaaatccgccaaggcgcgcacaaaagagatgcgccgcagcaccgccaaggccgtgcacacggtggggcagctcattgacggcgtagagaacatgttgaagtaactacccacggtcgcagtggcagcccaaaacgccgctgtggccgaatacatagatgttgcatggtgtgcggcgctcgccggcggctgcggcgcatttgagcgtcagcgagccggaagcgggctgctcgtagcaccgttgcagccggttgcagcacccgcccgcgatgtcgcgccagcggcatgccccggcatttgtgcagtgcttgatgcactccatatcgatgtagcgctgagaaatttcgccgcccgcgtggtaatcgccgttggagatgagcaggtgtgcgacggcgaggtcgccgataacgtttgaaaagtggctttctgtgccgtggtgtggcgctttgacgatatagtagccgtcaaacagcttcccggagatgcggcgcagcacttcatcggacacgtcgccggtcattagaatatcgaggttcgacgggccgcggcttcggcggttgtgaaagacgagggagaggtcgttctgcgtttcggtgtagacgttgcgcacgacggattgatttaaaatgtcctgaatatcaggcgcggcgggggaatgggcgaggttgctgcgcatatcctccatgcgacctaagaggtcgcggagagaatcaagcaggatgcgccgtctgccgggcgtggcgcggtcggacggcgcgaaggccgtttgacactgcatgtagagcctaacgaacgcatccttcgtctccaaaaactccgtttcgcgcccggtgtgaaacggggaagaaaggcagatgttgaggttttcgacggcttccgtcaggatggtatcgaacgggaagggctcgttacgcgcgggggagagcacctcgtaaaacgcgccgtcaaatgtgaagatgtcgccgccgccgagcgtgaaaatgcggtctgcgccgacagaatcattgagcgcgtcgaaaatacgcaagcaggtggtgttcacctgcgcgaagtcactttgcggcacggcgaaaaaatgcgcgaacacggcgaactccaaaacgggatttatgccgcgcttatcgcacgggagggcggggaggtatacgcggtcaaagtaaccgggatcccttttgacttgctttaaaaagccgctcatgtggtcgcggtggtagtgcgtgagcagaaactggcgctgagcggcgggcgcatagcggctgaaaatttcgttaaaacggcggtcaatctcctcttcaccgcggcgggcgtagcggctgacggagccgcaatccaccattaaaatctgccggttttgcccgacgaggacggtgcagtcgccgtattccacgtcgtgcagttcaacgcggtccattacgctttgtcctcgttctgcacgtggcggtacaaaatgccgttttcatagcggtcctctttccactcgccggtgtagacgacattgccgtttttgtcaaacgccgtgccgtgaccctgccgtttaccgttctgccagccaccggaataaatcaagttgccgtctgcatcgaacagggtagcttgacccgctttttcgttgttttcatatttttcgatgaacacgcagtgcgtttcggggtcgacggagacacctgcgccctgcttttggccgtcgatgatttggccgttgtaaattaaatcgccgtttttattgaaaatcgttgccatgccttgcggcttaccgttttgccagtgggaaatgtgcagcgcgtggtcgctttcgcggaacgaaacgccgaagccgtcgcgctgatcgtctttgaagtcgccgatgtaggagacggcgccgctgcggtagtggtgcacgccgaacccctcgcgcaggtcgtttttgtactcgccttcataaagcgtgatgccgttgttgttcacggtgcggccgaagccctcgcgtttgccgtcttcggaaaggttgcctgtgtaacggagcggcgtgccgcctctgatgagcgtgatgccggctttggggtcgtcttctttttcagcttcctttgcaggcagaagcttatcaagcagggcacgtgcctgccggagttcttccggcgtgatgtcgggggcggagtctgtttttggcgtttcttcgggagcaggttcttccgggatttcttcgggttcttctgcgggagtgtcctcaatgagggattcttcgacttctttcggctcgggttctgtttcgggctgaggctcagcttcgggtgcttcgtaggcagcttcttcgagaacgggttcctcttcggtagattctgcggctttttcggcggggtcgctcaggaaatcgacaagtgcgggctcggtgaggttcccgaaaacaggcagctcagactccggctcggtcgtttcgggcacgtcgccgtccttgacctcccaacccatggagagcatgacggaggcgtttttattctgcttcagaaatttgatgcggcgctgctgctcttcacgcgggcagtaggcgtattcgccgcgctcatcggcgacgagcagaaggcggtcgccgaactgggcgttttgcaaactctgctcggcggtttggaatgcatacggcacggggaacagcacggtttctttcgttttgccggtggaatcgttataatcaaagcggatgacggcgtcgcggtggtcgtccggcttaaaggtaatgcgcgcgcggcggtcgtcatcgggagagaaatactccgtgcgcatccattgcatttcaccgtcgtagtacacgcgggcgcgcaatgcgccgtaggcgttataaaacgcgatgccgcgctgaccgccgtttgtgaatgcggcttcgagcgtgtttttgcctgcgcgttttttccattttatagtgcggcgggagagcttgccgtgcacctcgccggaaagcccgtcgaaaatgccgcgggcgcggatatgtacggttttgccggatccgaaatagctgcggcgcgcttcataaagggcatcgtgaaacgaagacagcgtatcgagcccggtatagcacacggtgtagaccttacggttcacaaggcttgcgctgagagaagtggcgttatgttccgtcatctgaacgacctttctgcgggaaacgtgcctgtttcccgtcttttccgttgatatagtttcagtataccacgaaaggacgtttatttcaatcacacggttccttcggattttaacttgcgaaatgctttaaaatctgctatgatattgtatcatcgttctatactataatagatgaaaggatcgcgcggcatgaaaagtgtgaagaaagaagtctcgttcaggcgaaaactgatgacggctgtattgagcgtcacgctgccgctgatcgcgctgcttttgttcagcaacctgtattccacgcaggcatttaacaggaaaattgcggattccaacatgcgcacgatggattaccgggcggggcgcatggaggagcagctcgactctgcgaacgattttctcaccgggttgacggtgagcgacgattaccgcacgctgtcgggcggtgagaaaaaccccttaaaggcgtatcttgcaagctatacgctcattacgcagttgaaaacggcgctgccggcatacggtgatgtgggcgcgtttttcatttacagtgcgccgagcgatgccgagcgcgatatttttgacgattctatctcctacgcgcagaaggagcggctgcgcgcttttgtgcgcgacgctgtggagaacaacacgtattcgtacaatatgcagtggcggcacgcggagatcggcggcaaggcgtatttattccgcttttacggcgggcgcggcacgtatcttgtggcgatggtgccgttggcggcgctggcggacgtgcgttacatgcaaatcgacaccgacgcggtgatgttgttttccgacaaaaacaacgagccgctgacctctgtcgattttgtggagggaaacgggatcgatttgaacggcgactatgagaactactttatttcgggcgggaagcagcggtatatgatcgtgggccgcgatttggcgggtacggattgcagggcaatccttgccgtaaacgaaagcgggtatttcggctcgctcgatggcttgcaggcggcgctgctggtactctctttactggcgctggtattgattccggtcattcagtggcggctgacgaactccatctcgaagccggtggaggggctgcgcagtgttatggagcatatccgtgccggcaatctggaggcgaaggctgagggcaagacgaacatacgcgaattcaatgaggtgaacgagacgttcaacacaatgatgacgcagattaaagacctcaagatcgaatcttatgagcacgagattgagacgcagaaagcggagctgcgctacatgcagctgcagattcgcccgcatttctttttaaattgcctcaaaagcttatatgcgttggcggaagcgggcaaatatgaccgcattcaaaaaatgattttggagatctcgaagcacatacggtatatttttacggacagcatggagcttgtgccgctttcgcgcgaattagaccacattgaaaattacatcgagatgcagcgggggtcttcgcagtacccgccggtgtgccggtttgatattgacccgtgtttacgggatttgccgatcccgccgctttctttgcagagctttgtggaaaactgcgtgaagcatgtgtactcgccggattacgttttgaaaattgaggtgaaggcagcggtgctgcgcagcggcgcggacacgtttgccgacctgacggtgacggataacggcggcggcttccccgaggacgtgattgcggagatcaacgagccggacagcccgctgtacgcgcagaaccacgtgggcatcaacaatgtgaaaaagcgcttgcagctgatttacggtgaccgcgctttatatgcgttctttaatcgggatatgggcgaacgcatgggcagtgtatctgaaattttgattccgatagactgcgcaatgctgcatgcggcggaggacgagccggacggagaggaggctttcaacggatgaacgtattgatcgtagatgaccaaccggaagttgtggagagcatggtgaccggtgtaaactggaaagaaatacccgtggagaaggtatttacggcgtacagcgtgaaggaagcgcaaagcgtttttgaacgcgagcgcatagatgtgctgctgtgtgacattgaaatgccgccgacgaacggctttgctttgctgcgttgggcgcaggagcggttttccggcgtggtgtgcattttcctttctgcgcacgcggaatttgaatatgcgcaggaggccgtgaagcttggcagctttgactacattttgcagcctgcgccgtatgcggagattgaggcggcggtggagcgcgcggccggaaaagtgcgtgaagcggaaaaccaaagacggtacaatgcttatgcgaagtaccgtggcgaggacgaaagtgcggagaaagagccggacaagacggagcagacaccgatacagcgcgcgatgacgtatatccggcgaaacatcgacaaggatttaagccgcgcggagattgcggacgcaatctatttgaacccggaatatctttcccgcttatttaaaaaggaaacgggcgcctctttaaatgattatattgtgacggagaagatgcgcgcggcacaatctttgctgagtgacacaaacatcccggtgagcctcattgcgacgaaggtggggtactcgaatttctcgtatttttcgcaggtttttaagaaatacacgggcatgtcgccggtggaataccgtgcggcaaagcggcggtctaagctgtaaagcgcgttttctttcggtaaactgttgtaaaactgtcacaaaatgtaaaatccgtgtaaacgggtgaaagacagaaaatacatcttgcatttgagagagggacacccctatgggttttcctctttttttatcgatatagagtatcgatatgcaggattgtaaagaacatcctgcaaagtcttcacaaacatgtcacattttgaataggagatgtcacgaaatttgcagaaaagatgcggattttctgttactatatgtgtgtaatttgaccgcgaaggctaaaaataaatttatcgcgggtcgaaaagtatgaaaggaagtaagaaaatggcaaagagacttgtagcaatgctcatggcagcagcgctgaccctctccctggcagcttgcggcaacggcggttcttccagctccaccgcagactccagcacatcttccgaatcttccgcttctgacagcgctgcagctgatagcagcgatgcctcttccgaagcagaagatctgaaagaatccgagctcgtaactctcaacatcgtgacgatggcatccggtaaagaagaatccggtatcgcacaggttgaggaagcaatggacaagatcctcgaagagaagttcaacgtgaacgttaagctttccttcctcccgttcagcagctatgctgaccagatctccctgatgctttcctccggcgaaggcgttgaccttctcccggtttacatggtcaactacacggcttgcgctgattccggtcagctctatccgatggatgatctcatcgagaagtacggccagggcatcattgagcagctcggttgggacaacatcaactgcggtcgcgtaggcggcgagctgttcggcctcacggagggtcgtgatcttgcagcttcctatggctttgcatacagactggaccttgctgagaagtacaacctcgacatggattccgttaagaccctcgaagacctccacgatgttctcgttaccattaaggaaaacgaagagaactgctggccggtagctatttccgccggcgaaaacatccgtgcctggggttgggactctctgggcgacgagatggttaacctcggtgttctccccgacatggctacggacaccaccgttgtgaatctctacgagactgagcagtacaagaacctcgttaccacgatgtacaactggatgcaggaaggcctcattcaggctgacgccgtgaacaccaccgagactgcaaccactctgatggatgcaggcactggattcggtaccttcactaacctgaagccgtactatgcagaagagaacaacgcgaacctcaagaacccgatcggcacggttgagctggttccggcactggctaccaccgaccgtgttaccatgggtctgtggtccatcgcaggcagctgcgagcatccggaagctgctatgaagactctgaacgagctttacagcaacccggagctgagcaacctctacatgtacggtattgagggcgttcactacgaagtaatcgagaaaggcgctgttacgaacggtcaggacagaatcaactatccggacggccttgatgcaacgaccaccacttacagaaagtccggtacttggctgatgccgaaccagttcatcggcgacatctggggcaccgatctcccggctgattactgggatgtaacgaagaaattcaacgaagagtctcagaagtccgcagcatttggcttcaccttcgacgcaaccaaggttgcgaacgagatcaccgcttgcacgaacgttgttaacaagtaccacaaggcactcggttgcggcgctcttgacccggagacgactctcccgcagttcaactctgagctgaaggatgccggcatcgatgcgatcatcgcagagaagcaggcacagctcgacgcttggctggctgagcagaagtaatttacttcacaattagtcttaaagaagctggagcgagattcgtttcagcttccttgtgaaaatccgtgtctttttcccgaaagggaaaagggcatgggcgtgtacagagagatgacccttctgtacatacccatgttcttttggagaatttcaacggagcaggacgaaaacagattgaaaggggtttctaattatgccgaataaatctgccgcactggaaaaagaaatgaaagtgcgctcggcaaaaccgaataagtggctgcgcttttaccgctgcatcccgctgtatctgatgttccttccgggcgccctgtatctgctcatggataagtatatcccgatgagcggtctgatcatcgccttcaagaaggtcaactggcgtaagggcatccttgcaagtgactgggtgggtttcagcaacttcacctacctttttaaaacgaaggacgctttcaacattacgcgcaacacactgctttataacctgtgctttatcgtgctgggcaccgtgattgccattacaatcgcgattctcttaaacgagattacgagcaagctcttcaagcaggtgtaccagaccatcattctgatgccgtacctgatctccatcgttgtggtcagctatctggtgttcgcaatgctgagctctgaatccggctttatcaacaacacgatctttaaggcacttggcgttaagccgatttcctggtatacagagccgaagtactggccgttcattttggtcatcgtacatatttggaaggtgttcggctacgactgcatcctctattatgcaacgctcgtcggcattgaccacggctactatgaggcggcggtcatcgacggcgcaaaccgctggcagcagattcttcacgttacgctgccgagccttctgcccaccatcatcacgctgacactgatgtctatcggcaagattttctattccgatttcggtctgttctatcaggtgccgatggattccggcccgctgctcgacattacgagcacgattgatacgtacgtttaccgcgcactcatcacgctgaacgattacggcagatcttccgcagcaggcgtttaccagagcgttgtcggctttatactggtcctgtgcgcaaaccttgccgttaagaaaatcggcggcgaagagaacgcactgttctaaggaagggagagagaaacaccatggtcgaaaaaaacaaagggtttcaggtcggcgcacacattgtgatggccatcctttccctgtgctgcatcttcccgttccttctgctcatcatgtcctccattacggacgagcaggaattgatccgcaacggctacacgctgttcccgaaggcactcagtctgaatgcttaccagtacatgtttaagagcagcaacaagattatctccgcgtacggcatcacaatcctctccacggttgtgggtacggtgtgcggcctttccatgacaatcctcatggcttacccgctttcccgccgcgacctgccgggccgcaacggccttgcgttctacgtgttcttcacgatgctgttctccggcggtcttgtgccgacgtacatcatgtacacccgttacatcaaggtgagcaacacgatttgggcgctcgtcattccgtccctcgtggtcaacgcgttctacgtgatcatgatgcgcacgtacttctccacgaacatcccggaagctgttattgaagcggcgcgcattgacggtgcgggcgagttcagaattctgctgacgatcgttctgccgatgagcgttccgatggttgcaacgatgacactgctcattggtctttcctactggaacgactggaaaaacggtctttactatctccagcagaacaagagcctttacagtatacaggttcttttgaatgacatgctgcgagacgtgcaggcactgaagagcggtatggatgctgcggctgcggctgagattacggcgaacatgccgagcacgggcatcaagatggcaatcgccgttgtcggtgttttgccggtgctcatcgtttatccgttcttccagaagtacttcgttaagggcatcacgatcggcgctgttaagggctgatttgatcaatcagatattctctttgccaacataataatagaatgacaaaaatcaccttcgcggttttcctccggcgagggtgattttgttatgtacgggtattttgttacggtcgttgttttatgtgttttcttcgtttaagtcctgtaatctaaggccggcagtgccggtgacgggcagagaaaagacgatggctttcgctttggtctcaagcccggcttcctgcataatggcagtcatgacgttgtttttatccgcgtgctttacgacgatgagcacaagctctttttcactggcgagggaaacgccgaggaacttttccgcgccctccatgccggtgcccttcgcgtggatgacggtgccgccgcctgcgttttcgcggcgcgctgcggccataatctgctcggtatagccctggtttgcgatgacgaccagaagctcgtatttggtatctttcaagacgctttcctctcctttctgaaacggctgaccgttcgttaaaaactccagctgacgtttgccgccgatactgctgagcggcatggtgaacgcaatgccggtgccgggaatatcgatgagcatgatggtctgcagccccttttgcgcggcactccagaccttgccggtgacaacggaaagcagcacggctttttgtgtggcttcaagtccgaaatcgtttagaatttcggacgcggcggtgcctttgccgagcgtgctgagcacgacctcgatcccataggttttataaaatgacagaaatttctgactttggttgcggtctgtaatggtaatcatccagtataaattgtcgcccataaacgccctcctttacagttcgatgatcgcgttttcgtccatatcggcgaatgcggcgggtgcggcggtctccgttttacggcgctgcatgagctttgccgcgaggcccatgacctgaatggtgatgagcggcgtcatggcgaccatggcaacgacaccgaaggcatctgtgaccatgttgccgccgacggccgtgcacgcgccctgtgcgagggggagcagaaatgccgcggtcatggggccggaagcgacgccgccggagtcaaacgcgatggcggtgtagatcttcgggacaaaaaacgagatgatgagcgcgagcgcgtagcccgggatgaggaaccacaaaatcgaaatgccggtgaggacgcggatcatggcgagcccgagcgagatggacacgccgacggaaagcccgatgcccatggccttggcggagatggcgccgtctgtgatctcctcgacctgacgattgagaacgtacacggcgggctctgcgcgaacaatgaaatagcccatgaccatagcgacgggaatgacgacagcggagtatttgtaagaagctaactgctgcccgaggtaatgaccggcgggcatgaagccgacatttgcaccggtaagaaacagcacaaggccgatgtatgtataaacaaggcccatgccgatctggaataatttgcgcttagaaagccgcagaacaagaaactgcgccgcgaggaaaaagagaatgatcggcaggagagagacggcaatctcgatgaggtaggtcgggatgccggtgcggaacagctcgaaaagctccgaggaatcctgcatttcgggcaggataggcagcgtgtaggtgctttcattcggattatagatgatgccgaggatcatgacggccaaaatggggccgatggacgagagcgcaacgaggccgaagctgtcgtctgccgcatggcggtcgctgcggatggccgagatgccgacgccgagcgccatgatgaacggcacggtcatggggccggtcgtcacgccgccggaatcgaacgcgacggcgagaaattccggcgggacaaagaacgccagaagaaacacgacggcgtagcatccgacaagcagcggcggcagcgcgatagaaaacagcatgcgcagaagcgacacgacgagaaacacgccgacaccgcatgcgacggatagaatgagaattaaattcggcacggacggcacctgcgatgcgagcacctgtaagtccggctccgagaccgtgatgataaagccgagcaaaaacgaaagcgtgataacgacaccgagctttttcgtttttgtcatggcggtaccgatgcgctcgcccatgggggtcatggcggtctctgcaccggtggtgaagaacatcatgccgaccaaaatgagcactgcgcccattaaaaagcacagcagaacgcttggcgagagcggcgcaatggtgaacgagagcgccagcacgatggtgatgatgggaaggacagcctgaagcgcttccttccatttttcagagaggatttgtcttagcttcaatcgatgcctcacgacctttcttatgtgttgtggggtggttgaacgaaaatcacttttattatagcataaaaacgcgtggctgtgacgattgaaattgtgaatttttcaaaaaattgtataaacctaaaccaaaacggaaatagagatgaaaacgaaaaggctgcccggcaaagtgcgggacagcctttttggatgaaattatagctttgaaaggagtgcttcgacgtggctttgtgagaacgagggtttgtcgcccatggggaacgggatatgaagcgccttgtatttggcggcgcagatgtttttaaacggcagccactcgattttctccaaattggagaacgactccgcgagagctttgacggcgcggaggctctcaaccgtatcggaaagaccgggcgcgacgacgtggcgcacccagaggggaatatgcatcgattccgtaaggcgcatgaaatcgaccgtgtgcttcaaggagccgccgcagtgggatttgtactgcgcttccgtgggaaacttgatgtcgcaaaggacgaggtctgtgtgcttgagaacctgcttggcacgggaaaggtcgccggcgccggcggtatcgagcgcggtgtggatgttgtgttcatgcaggcgccggaataattccgcgacgaactcgggctgcaggagcggttcgccgcccgagacggtgacaccgccactttcgccgaaataggggcggtaacggaggattgttttgcagagatcctctgctgtgtagggcgtgccgccggttaagtcccacgtttcggggttatggcagtaggcacagcgcagcgggcagccttgcagaaagacgacgtagcgcaggccggggccgtctaccgcgcccatggactgcacggagctgacgcggccttccattagattgcctcatggaatgtgcgggagatgacttcgcgctgctgctctttggagagacggtggaagttgaccgcatagccggaaacgcggatggtgaggttggggtatttttccgggttatggtaggcatcgatgagcgtttcgcggttcatgacgttgacgttgaggtgatgcgcaccctgaatgaagtagcccgaaaggagctggacgaggtttgtgatgcggtcttcctccgttttgccgagggcttccggaatgatggagaacgtgttcgagatgccgtcgcggcaataatcataagaaagctttgcgacggagttgagctctgcgagcgcgccggatttatcacggccgctcatggggtttgcgcccggggcgagcggctcgccgagtttgcggccatccggcgtgttgccggtctttttgccgtacataacgttggaggtgatggtcaaaatggacagcgtgtgctgtgcgccgcggtagagcgggtattcgcgcagggcatcgtagaagcggcgcacctgctcgcaggcgatggaatcgacacgcgggtcgtcattgccaaagcacgggaactcaccctcggtctcgaagtcggtgacgaggccggtctcggggtcgcggatgcagcgcaccttggcatatttaatggcggaaagggagtctgccatgcagctcatgccggcgatgccgaacgccatcaaacggcggacgttcgtatcgtgcagcgccatctggctcttttcgtaggcgtatttgtcatgcatgtagtggatagtgttcatggcatcgacgtaagtttttgcgagccaatcgcggtagaaatcgaggcggttgaggaggccgtcgaaatcgacgtattcatccggccagacaggcatttcaggcgcgacgcgggtctttttcacttcgtccatgccgccattgatggcgagcagtacgagctttgcaaggtttgcgcgcgcaccgaagaactgcatatctttgccgacgcgcatggcggagacgcagcaggcaatggcgtaatcatcaccgaatgcggggcgcataacggtgtcgctctcgtactggatggcatcggtatcgcaggagaccttcgcgacgaagcgcttccagttttccggcaggtgctttgaccacagcacggtgaggttcggctccggggacgggtggaggttatagagcgtatggagcatgcggtaagagtttttggtgacgagcgtgcggccgtcctcgccggtgccgccgagggactcggtgatccacatggggtcgccgccgaaaagctcgttgtattcgggtgtgcgcaggtggcgcgccatgcggagctttaagacgaaatcgtccatgatctcctgtgcgccggattcatcgagtacgccttctttgaggtcacgttcaaaataaatgtcaaggaatgtggaggtgcggccgaggctcatggcggcaccgttctgctctttgatggcggcgagatatgcgaaatagagccactgcacggcctcgcgggcgttttctgccgggcgggtgatgtcgtaaccgtacatggcggccattttcaccatgtccttgagcgcggtgatctggtcggtgacttcttcggaaaggcgaatggtatcggccgtgaggggatttttgccgaggtcggctttatctttctgcttttggagaatcaaacggtttacgccgtagagcggaacgcgtcggtaatcgccgatgatgcggccgcggccgtaggcatccggcaggccggtgatgatgccggcgtggcgtgcggcgcgcacgtcatccgtataggcagagaatacgccgtcgttgtgggtcttgtggtatttaaactcctcttcgattttatcggagaccttgtagccgtaggcttcgcaggcggagcgcaccatgcgcatgccgccgaacgggttgcaagcgcgctttaacggctcatcggtctggaggccgacgatgatctcgttttccttatcaaggtagccggggccgaaagacgttgcggtgatgacggtttcggtatcgatgttcaaaacgccgccgttttgctgctcggcgcggcagagagcctcgtacttttcgagcattttttcggtgcgcgcggtcgggggctgcaaaaagctttcgtcgcccgtgtagggggtgtagtttttctggatgaagtcgcggacatcgatgcgatcctgccacttaccgcctttaaaatctctccaagcgttcatagtttcccattcctttccggcgttttgccgtgcaaatttccttgttttggaagctgctgacataaaaacagggcagtgctttcaaaacactgcccagacggtcggctcattttcatacttttgctccacgatgtccccatcttgtattccgtcagtcacaaaagtactttagcttgtggtcttattgtacacgcaaaagtgcgaaatgtcaactgtgaattttacgttcgatgtactccacctctttgtcgagcataacgggggtgagggaaatgccgaacaggtgctcgataaggccggtttttaatagctcctccggcgtgccgctttgcatgatttggccgtttttcatgagaagcagccggtcacagaacttgaacgcgagggggagctcgtgcaggacgatgccgacggctttgtttttcgctttgagcgtagagaggagcgccataagctcgaatttatggtgcgcatcaaggtaagtagtgggctcatcgagcaggacgacgtcggtgttttgcgccaaaagcatggcgaggaacacgcgctggcgctcgccgcccgaaagcatgggcaggcggcgatcggcaaaggccgacacaccggcggttttaagcgcgttttgaatgacggcgcggtcttcattggacagcgtgcgcgaaaagccgaggtagggatagcgcccatgggagacgagcgttttggcggtgatatccggcacggccctttgctgcggcaggaacgagacgcgccgcgcgagagctttgggggcaagggcggcaatgtcggtttccgcggtaccgccgcacagggtgatgctgccggaatccgctttaataaggcggcagagcgcgcggagcagcgtcgttttgccgcagccgtttgggccgaggatgccggtgacttcgccgcggcggagttcgcccgagactccgcggagaatttcggcgtgatttaacgtgacgcaaaggtcagcgaattttaaggcggtggaaaggttttggttcattcgagttttcctccttttttgcgcacgatgaggaaaaggaagaacgggccgccgagcagcgacagtacgatgccgacgggaatctcatacggggaaaacagcgtgcggctgagggtatcgcacaataagacgaatgacgcgccgaagagggccgaaagcggcactaagatgcggtggcgcgcgccgatgaagtggcgcaggatgtgcggtacaatgagccccacgaaaccgagaagccccgaaaagctgactgcgccgcctgcaagcaggctggccgtcatgagcaggagaaagcgtgttccttgcacacgcatgccgagcgactgcgcggtctcatcgccgagggagagaacgtccatttcgccggaaaacagcacggcaaggagcaaaccaagcaggatggcaacccacgcgggggtgagattttggtacgcgatgccggaaaatccgccgatgaaaaaggagctggaattatagatggtatccgggaaaaaggtctttatggcgttgctgccggcggtgaaaacactgcttaaggccacgcccgcgagggtgatcgttgtgcgggaagcaccgcttttagccgcgacggcataaatgagcagcgacgcgaaaagagcgccaaggaatgctgcaaacggcaaaaacgcggtggctgtggggaagacggcgagcaaaaacagcacggcaaagcccgccccggcgttgacaccgatgatgttcggtgcggcaagggcgttatttaagacattctgtaagagcacgccggagaccgcaagtgctgcgcccgagagcacggcggcaagggcgcgcggcaggcgcacgtagaacaggatgcggctgtcgggcgttaaactgccgttttgcagggcagagacagcttcgcaaatagaaatttgtgccgagccgacacagaggctcagcacaaaggagaaaacgagcagcaggagtgctgcgggaaataaaattttcttacgcatcttcgttcaaaaggagctttgcaatgtatgcgtagctctcgtcccagcggtttaagggcttatagtgaaaaaggtctttcggcagatagatgtagcggccgtttttcacggcggaaagctcgctccacgcggggttattctcgatgttctctgccatgtagatcttggcgttttcttcgctgcccatcgtcatgacgaggatgtagtccgggtcggcttcgatgacggattccaagctgaggtcttcgagcaggctttcgtcatcgtctgcgatgttgtgcgcaccgagctcttttaaaatggcgcccgcaacggtgtcttcgcctttggccttgacgccggtggaataagcgcgcaaaagcaggacagagggggctttctgcccggagagcttttcggctgtctcctgctttatagattcaatgcgctttaaaacccgcgtgacgttttcgtcgtatttttcaccgtccgggtcgttgacggcgcagaaattcagcatgatctttgcataatccatgacgttatccatgtggaaatagccgtggggaatctgcatatcggtgagggcggcatcaagctccgcgtgggcgggcaggtcggcggataaaatcacgtaatccggggagagtgccgcgacgctctcaagattcggctccatgacggtgccgacgagcgcggtgccgtcatcgatttcgatgccgtgctcgtctacggcatcttcggtaataccggcgagcttaccgccggagagcagccagcactcggcaaacgagccgtaaagggagacgacgcacggatcatcggggagctccgttttggtgccgtaggaatccgtaatgatgcgctcggagacggcggtcgtttcggaagcggcggaggagctttcaggggtggtttcgttttgcgccggggcggcgcagccggaaaggagcagcacggcggaaagcgcgagcgctgcgaggaacttgagtttcatagggtatcctttcggaattattttgcgaggatctcctcgcggcggttcagaagatcatcggagaagacgtcgtgctcgaatttttcgatgccaagacggtcaatagctttgccgaggcgttctttgggcatggcgttttccttgaaccagagcatggtcttctcgagcagaggctcaatctccgcgcgggtgacgaagcggctgagcggcgtgcccatgcgcgtttgcttgccccacgtgccgccgacataaatgcggtaaacgaccgggctttcgtggcggacagccttaaacggacatttgccggtgcagacgccgcaggcgaggcacttttcatcgatatgtaatttgccgctttcaacgtgtgcagccttggagggacatgatttttctaccatgcagaccttgcagccgcggcaggtgtcttcgtcgaagatcggcacgcggtggccctcgatgccgaaatcgtttaaggaaggcttcatgcagctgttcgggcagccgccgatgccgattttgaacttgtgcggcagtttgacgtttgcccagccgacgtagtatttttcgtgcagctctttggcgagcgcctgtgtgtcgtagttgccgtagacgcacgtggttcccttacatgcggtgacggggcgtattttagcgccggtgccgccgaagtagaggccgcgctcggcagcgtaatcgcaggcggcgtcaatctgctcgaaggggatgccgacgatctcggcggacaggcgggaggtgaacgtcaccttgccgctgccgaatttttcggcaatctcggagatggtgcgcaggtcggcagcggtgaagaccgcgccggcgcagacgagacggccggagaaacactctgtgccgcgattgatgaggaagccgcggcccttgacggacgcgatctgttcgggttttaacatgatgaacactccaatatccaagcaaaatattccctgtaattatagccctttttcggggtaatggcaagaaatgcgggtgatttttgcaaaagaaatgaaaaaactgggcgaagtattggattttcctttgaactgtgttaaaatagctaataacaaatcatcttctgttccagcggcgttttgaatgcgcgccgaaaaaagaaaggcgaagtgagcttttatgaaacgaagcatccattataaaaacattttgaaaacggcggtcacggcggcactgtgcaccatgataatccttggcaccgcggcttgcggcaagggcagcgccaaggcggagccctccccttccccgagcgtggtgcctaccgcaacgcccgtgccggtcgaaaaagtgaaggtggcgaccatcaacgacatcgacgattcgttgaatgtgcgcagcgaggcttcgacggattccgaaattctcggcacggcagaggccggcgaggcgttcgaggttgtggcacaggacgatacctccgagtgggtggaaatctcttactttgggcagaatgcgtatgtgttcgcggaatttgtgacgatcagtgagaaagagaagaccgcacttgcgaccgcgactccttcgccgaccccgaatgcggaagacggcacgaccgatgacaacggggacggcggtgacgcgcaaaatggcagcgaggcatcgccgacacccgctcccaccgcagagccgacgccgaatgcgaataatcctatcatcgtaaacggcggtaaccgagagaatacgagctccggcagcacatcagacggcatgacggcagagaccattcgcgatacggaagatccggagcgacgttgaggtaaactatgaatgtgttagttataggctgcggcctgcttgggcgaaaaatcgcccgcaccatggacgaaatgggttgggacgtttctgttttaagcaacattgaaaacgacttggagcttttggaaaacgatttcgagggcgtgacattccgcgggttcccgatggatattcgcaacctgcgcgaggcgggcattgaaagctgcgacgcggtggcggtgacaacggcggacgataacctcaatatcacggtggcgcagattgcgcgcgattacttcggtatccaaaacgtggtggcgcgtgtatccgaccccacgcgtgaattgatttttgagcatatgggattgcataccatttgccccacaaaccacgccggcgaccgcattgtgcggatgctgagcggagaaaaaatgaacaagaaaatcgagttcggtctgcatacggtcgactttgacgtgcggccggcggagcggcatcagatcggcaagaatgtgggcgaactgcgcggcaacccgggcgaagtggtgttcggcatcatccgcaaaagcggcgcgttcgttttagcggggcttgcacccttgaagcccgaggcaggcgacgagattgtgtacagccgcgcaatcgattaagggggaagtgccatgaacattgtcattatgggcggcggcaaggtgggcgaaagccttgcgcgccgcattttggagggccgccacgaggtgcgtatcatcgagagcgaccgcgcgcgcagcttacagcttgcaaacgcgctggacgcggagatcatctgcggcgacggcacgaacattgacatgctggaaaacgccggtgtacgtgacgccgactgctttattgcgatatccggcgacgatgcgaataatcttgttgcgtcgcagcttgcaaagcagtatttcggcgcgaaaaaagtgattgcccgcgcaaacgacccgcgcaatttggagacgatgcgtgtgcttggcgtggattatgcggtgagcagcacggaaatcattgcgcagatgattgagcaggaagcgaacctgatggagtttcatcttgtggcatcgctgaacaagggccgcggtcagatttgctccgtgacgcttggagagaattcggctttgcacggcaagtcggtgcgtgaggtggtgttcccgaagggggcgctgctgatttccattgtgcgaaataacaagctcatcattccgggcggcgacacggtgctgcaagcgggcgatgagattattgcagtatgcgaggaacgcgcacagaaggcacttatccgcctgatgaacagcacgcatgcggatgagaaataagtcgatttttttatggtttatatagcaggaaccccgtaggcacgttgtgtgtttacggggttctgctttgttcatttaattctaatgatttgcggggaaaatcatgcagggagcccgtgcaactgggtttcctacggttctggttttgtggaggcaaaaagtgtttcacgctctgcggagcgcgacttggggcgttgccccgagcccccataaactttctggaaaaaagtttaatcaaagacttttaacgttgcggtattgtggatttcggcggctttattttacagctttaaagtgctttgtgacgctggtgccgtcttcgtagacgtctcttgtcaaattaaggcctgcgttcatcagcatggcgccggaatagacggtgccggtctcctcgtcctgatagtacgttttggggtcgaggccgcgcaggcgctgcacgcagtaacgggtctcgggctgacgcatgacgacggcagtcatcatggcttcctgtttatccggcgagacgaactcccacgcgcagtagaagtcgttctcggtcggggagacgaggcggtagaaatcgccctcgcggacaaggcggtgatatttgcggtagtcggcgatctgctgctttacttcggctttttcgtcatcggtgagctttctggggtctaactcgtagccgaatgtgccgcacatggcgacgttgccgcgggttttaagcgaggtgcgcgggcgggctgcgacgtgtgcgccaaacgaggagatagggtagcacatggacgtgccgaactgaatggtgaggcgctcgatggcgtcggtgttgtcgctgcaccagatctgcggggaataatacagcatgccggcatcgaaacgtccgccgccgccggagcagttttcaaagaggatattcggaaacgctttgacaaaacgatccatgaggtcgtatgtaccgagcacgaagcggtgcatgacctccttctggcgctccggcgggagcagcgcagagccgacctcggtcagattgcggttgaagtcccatttgacgtaatcaatcttattttcactgaggactttatacatctgcgcgaagatattatcgcgcacgtcttttctcgtcatatcgaggacgtactgcaagcgtgcgggggaattttcacggttcggcacgtgcaggcaccaatccgggtgggcgcggtagaggtcgctgtccggagagatcatctcgggctcataccagatgccgaactttaagccctctgcgttgacgcgctcgatgagggaactgaggccgcctttgagtttctcttcgttgacataccagtcgccgagggaggaatcgtcgctttcgcggtggccgaaccaaccgtcgtccatgacaagcatatcgacgcccattttggcggcttcgtgtgcgaacgcgacaagcttatcatcgtcaaaatcgaaatatgcggcctcccagctgttgatgagcacggggcgttccacatcgcgccacggactcttgatgaggtgcttcatgtaggtgcggtggaaaatgcggctcatctcgccgaggcccttatcggtgtagaccatgacggcttccggcgcggtgaaggattcgtttggctccaggcgccaggtgaaatcggtggggttgatgcccgcgagaaggcgcgtggcgttcaaacagtctacctcggcttcaatggagaagttgccgctgtaaatgaggttgacgccgtagacttcgccgttttcttcggtggcgccgtgggctttcagtgcgacgaacgggttgtggttgtgtgaggaagagccgcgcttgctctggatggattgaatgccgtggcagagcgggcgctctgtaacggtgcgctcctttgcccacttgccgtaaaggtgcaccatgtcataatccatcgtgttgaagtcgaggcaggcgctgaacacacgctcaagctccatggcgcggtcggaggtattcgtcacgacggcgtgacgcgtcatgacgggcagatctttgtaaacggtgtagtagagcttcacttcggcgttcgtcgtttggtcgagcgtggtgacctcgagcgtttcgctgtcaccgttttcgtcgcgcagagacggcatgccgggcagcgcaggcttttcgcttaaaatgcggtgcgaaacgtagcggatgtcggtcgcgatattgccgtccgcgttgcggatttggagtgcggagatacggaaatcgccggtgccgttgcaggaatattcgctcggctgtgtatccggggaaaactccgtgccgacgtagcctgcggcgtcgggcgtgaaggagccgaagtagccgcggtccaataaatagcgcatgtcgcagtccggcaggtatgcgccgtagtagaggtgcagcaggcggccgctgtcatgcacggcaaaaacgtaactggaggaagcggtatccagcttgaaaattttcttttcgatatcaaataaaatcgccataagatcgttcctttcgggaaaacataaaaattcgggcagagaaatatccgtttataacaacagtatatcgtttatgcggcttttgcgcaataggcatttgttgcataaagttggcggtttgtgatgcggtgtacggcgcgggcttcggcattttgctaaaggcagcgatgaaatttggtggaattgtgatagaaacagctttttcggaaaaaatagctttacttttctcttggtttgtattatagttaatgtgatgtggaagcggttacatattgtaaaggactgtatgtgttcgctttcgaatgtcttttgaaaaaatataaaatggaggaaactacaatggctaaaattatcggcaatgcactcccgaacatcccgtggcaggataagccgcagggctacgataagccggtttggcgttatgaccacaacccgatcattccgcgtgatctcatccccacttccaacagcatcttcaactccgcagttgtcccgtttgagggcaagttcgctggcgttttccgctgcgacaaccgctctgttgagatggacatcttcgcaggcttctctgatgacggcatcaactggaagatcaaccacgagccgatcgagttccagccggctcccggctgcgacccgtgcgtaacccgcaaggaatatcgctatgacccgcgcgtttgctggattgaggaccgttactacatcacctggtgcaacggtttccacggcccgacgatcggcgtaggctatacctatgactttaagaccttctatcagatggagaacgcttacctgccgtataaccgcaacggcgttatgttcccgaagaagatcaacggcaacttcgcaatgctgagccgtccgtccgacaccggtcacaccccgttcggcgacatcttctacagcgagagcccggacatgacgtattggggcaagcaccgctatgtcttcggcacgagcagtcactccggctggcagtccaagaaggtcggccccggcccgattccgatcgagaccgatgaaggctggctgatgatttatcacggcgttctgaactcctgcaacggcttcgtttatcgcttcggcgtagcgcttcttgaccacgagaagccgtggatcgtgaaggaaagaggcaacttctatgtcttcggtccggaagagagctatgagctcaccggtgacgtgccgaacgttacgttcccgtgcgctaccctgaccgacgccgacaccggccgcatcaccatctactatggtgctgccgacaccgtcaccggcatggccttcaccaccgttgacgagctgctttcctacatgagaaagtacccgcacgaagtataagacaccattgtacaaagaccgcctgacggcttagcacactgttgtcttgatcgctttggttaaattagaatagctttttcgcaggcgcttccgtttttcgggagcgcctgttttttatggaattgttgtattttacggcaaaatctggtatgatgaagctatgaaaaaccgcgatgggcggaaaacggttaggagctgtatgaatatgaaagagtatgtcattgagaaaacggtgggtgcgccggactggacaaaggtgtcggagctgcaggtggacaatgtttgttggttgccggacgcgggcgtgcgcatggagcagcagatctgccacgacgacgagaaaatctacgtgcaccaagtggcgcgcgaaaagaacatccgcgcggagctaaccgataagctcggcagcatctgcacggacagctgcatggagtttttcttctccccggtgccggaggacgggcggtattttaacattgaactgaacttgaacggcgcgattttccttggcttcggccacggcagagcagacagcatccgtttgatcccggaagaccacaagaagctttttaacatccgcacgaacaaaacggcggacgggtgggaaatcttttatgaaattccgctcgaatttctgcatgtattttaccccgattacgactttaaaagcgggcgtgtgattcgcgcgaactgctttaaatgcggcgacctcaccgtgcagccgcactatatgatgtggaatgagacaacgagcgaaacgccggatttccatcgtccgcaggattttggccgcatgatcttcgcgtaaaccgcggtattcagcgggatattcatggattagtccaatatcttttgccgaagcccgcgcagaattgtcgtttttccaagttgcaaggtgagcgaatttccagtaaaatagtaataatgggtaaatgaaaaatatcgcaaaagttttgcatagcttatgcgcctgacgcaaaactatcgtttagagtattgcgtcggcaggaaaggattggtgtgcatatgccactggaaaggatcgacagttattttaacggcgcggtggagtcttatgacgagcgcttgaaacgcagcgcagaggatgaagacggctacattcgccgcacggcggagtttttcccgaagaaggagcacctgcatattctggacatcggcatcggcacgggcacgggtcttacggcaattttagagcagaacccgacgatttatgtggacggcattgactgcgcggataagatgctctcggaaattccgaaaaatctgccggagcacaaggagcgcatccgcacgatttgtagtgatttctttaaatatgagttggagtcggaaagctatgacggtgcggtttccatgatggcgctgcattattacagccgcgaagagaatttggagctgtttcaccgcgtgtgccgcagcattaaaaagggcgggttctttctgttgagcgacaaattcgcgccgacgcagatgtatgaggacttctgccgttccgagtttgagcagaagcgcaaggagcagcatttgtcggcagacgagcattactattgctttacaccgcagtatgtggcgggcgaagcggcgctgcttttcaaagcgggctttgcagaggtacgcgtgtgctgggcgaaatccaacacggcagtgcttcttgccacaaaataagcaaataacagttgaaaagccggtcgaactgcgtacaaataagcggtacgcgtcttgaccggcttcttttttaatgctataattttttaaaagcaactattttggaaatgggtgaatacttttggaactctttaacgcacagcatgttttgcacggcgagcctgtgacgggcgagctgccgtctacgaactcgcttttcaaaacgaccatcaacatggcgtggccttcgatggtggaatcgtttttggtggcgctcgtcggctttatcgataccatcatggtgagcacgctgggctcttacgccattgcagcggtgggcctgacgcagcagccgaagttcatcggtttggcgctgtttatgtcgatgagcacggccatctcggcgctggttgcacggcgtaggggcgagcagaaccgcgaaagcgcggtgcgcattttgaaaacgtgcattctggtcgccgtgattttaacggcgatcatcagcgttacgtttacggcgtttgcagaccccattatccgctttgcgggctcggcggacgatacgcatgaagcggcggtggagtatttccagatcatcatgggcggcatcgggtttacgaccgtgatgatgatcgtgaacgcggcacagcgtggcgcgggcaacacgaagatcgcgctgcgcacgaacatagtctcgaaccttgtgaacgtggtgttcaactatcttttgatcggcggcaacttcgggtttccggcgctcggcacgcgcggcgcggcgcttgcgaccgtcatcggctctgtgatcggctgcgcgatgagcttgcactccatgttcgcgaaatcctcgtttgtgtatatccgtggcgtgaaaggcttttttgcctcgaagtttgacgtgcgctccctgcttaacgtcggttccagcgcgtttgtggagcaaatcttcctgcgcatcggttttttgctgttcgccatcaccgttgcgaacctcggcaccgctgcgtatgctgcgcaccagattggcatgaatatgatgagtttgacgttctcgttcggcgatgggctttcggtggcgtctgtggcgctgatcggcaggagcctcggcgaagagcggcgcgaccttgcaaagctgtacgcctccatgtgccagcggattggacttttctgcgcgtttgtgatgtcgatgatcttcctgttctttggcaggaatctctatggcctgttttcgaatgagcaggaaattctcgatatgggtgtgatgattatgcgcatgctgtgcgttattatttacttccagatcacgcaggtcattttcttcggttgcttgagaggcgcgggcgatacgaagtataccgcgtttgcgtctatgatcagcgtcaccattatccgaccggctctgagttggctgctgtgttacccgctgggattgggactgcttggcgtgtggcttgggctgttcggtgaccaatttatgcgattctgccttgggtatttcagaatgaagcagggcaaatggctgaaaattaagatttgacgcgtttacgacaacgatagcggagcgacgaataaagtctttgcccaactttcttcgagaaagttggtggggtcttggggcaacgtcctaagtcgtcgttcgcaaacgacgaaacaccttttgcctaacccaaaaccaggaaggcagcttgaaacatccggtggacgcttcaagcgtagggaacacagttgcacgggttccctgaaaggcagtctgcgactgtctttagaaattcaaacaagataaaatagaagcaaaaagtctccgtctttctctgaatcaaagaggaaaacggagacttttatattttaaaatagtgattattccacaacgaccgtgcagtgctcggtgccgtagtattccatcgcggagatgacctcaggggtcaggcgctcaccgcatacagcaagcggcactgcgggtgggcagctcacgttggcgtctgccaaaatgcggttttcgcactcggaaagcggcaacgtttcactcggtgagaagagcgcctcgcgcggggaaagtacacgctcggcatgcggcggcacaggcggctttgaaaggatcgccggggcgggcagaacggagagcagcgcgcgctcgagacgagcaaaatctgcgggtgtgatctccggcgtgaacatcatcacaaggtggtctgtgtcggaaaactcgcagtaaatgttgtggtgcatcaaaatttccgccagaactgtgcccgtgtagccgaaggacttcggcagtaggcagagctttgtgcgctcctcgccgcaaagagcatagccgtgcgcacggagctttgctttcagcgtgtcaagacgctccgcgcaggctttgagctgtgcgggaaaagatgttgctaaaagcggattcattgcgtcgagcgactgcaaaatgaggtaggacgggctcgtggacgcaaagagcgccatggcgctttccgcacgctgcgcgaacatgtccggcgtgccgtgcgcgatgtgcagatacgcgccgcccgttaagaccggcagtgttttgtgtgcggaatcacagcagatgtctgcgccgagctgcatggggtgcatgggctcgggcagaaaatgcaggtacgcgccgtgggcgttatcgacaagcaatagtacgccgtgttttttacagacggtggacagggacttgatgtccgcgatgttgccgagataatccgggcttgtaatgtacacggcggcagggttttccgatacgatcacgtcttcgagctgcgcgggggtgatggcgcaggaaatgacgctttctgtgccgtagatccagcgaatgtcaaggtcgagcagcgctgcggccgtcatgaagaccttgtgtgcgttgcggcctgccgcaatgacgggctttttgtgatttgcgcgggcatgcagcagcgcaagatacagcatggcgcggatgcacagggacgagccctcggcggaatagaccgtctttttggtgccgaataacgcggcggcgttcgcttcgctttcgcggatgatgccctcggcgtggtagagcacgtctgcgccctcaatctcggtgaggtcgagcggctcggggccgagcagcgcggtgcccttgtggcccggcatgtgcatgcgcaaagcgccgctatatcggtagcggcgcacaaattcgcagattggcgcggttatcatgcgttgttatccaatgccttggaggcttcgagcatgatggcgcattccatgcgttttttaaagagctcgcagccctctttgtaaacgccgcggacggagccggtggcgtggtaggcgtttgcggcgcagccgccggagcagtacagtcttgcccagcaatcgcggcactcggggtgagcgtacacgttgcaggaggcgaaatccgcctgaatttccgtgttcgtcacgcctgtccagacatcgccgaggcggaattcttcgtcgccgacgaactggtggcaggggtagaggtcgccccacggggtgacggccatgtactctgtgccggagccgcagcccgaaatgcgcttgtaaatgcacgggccgccggtgagatcaatcatgtagtggtagaacgtgaacggtttgccggcgcggcggcgctccagcatgagctcagcaagcttttcgtactgctccatgacgatgacgcggtcttcgtcggtcagcgcggaggggtctcccggtgcgcagacgaccggttccatgctcagttccgtaaagccgaggtcgagcatctgctgaatgtctttgagaaaatccgggtttgcgtgcgtgaatgtgccgcgcatgtaatacgccttgttgccgcgcgccttgacgagcttctggaatttcggaacgatgcgatcccaactgccgttgccggcgtagtctacgcggtagcggtcgtgcacttccttgcggccgtcgaggcttaaaacgacattgctcatctcgcggtttgcaaaatcaatgacgtcgtcgtcgatcaaaacgccgtttgtcgtcaacgtgaagcggaagtgcttaccgcattccttttcgcgggaacgggcatacgcgacaagctgctttacgacgtcgaaattcatcagcggttcgccgccgaagaagtcgacttccaaattgtggcgcgtgccggagtgttcgagcagaaaatcaagcgcctgcttgccgacctcaaaggacatgagagcgcggtcgccgtggtatttgccctggcttgcaaagcagtaggagcagtttaaattgcaggtgtgcgccacgtgcaggcacagcgccttgacgacgttggcgcttttcgctttcagcgcacctgccatcggctcgaacgtatcgggggtgaagagcttaccggcgtcgcgcagctcttcaatctgctcgtagcactcgttgatgtcggcttcggtcacgtcctcacggtcgccgtatttttccagcatagcggcggtaatcgcctcgcggctttcggtctcgaacaggccaatcatgtcataggcaacttcatcgacaaggtggacggagccggaacagatatcgagcacgatgttcatgccgccgagtttataacggtgtatcatctaaaaaatcctttcgcatctatacatgaaaaaagccgccaaaaaaggcggcgttttctgaacctttgaattacttcgcgttcttctccgtgttctcgcactgctggtttgcaatgccgcagctcgtcttgcaagcagactggcaggaagtctggcactcgccgcagccgccgttctttgcgctttcgcacaggttgcgggtctcaagcgtctgaatgtgtttcatatcatttcgcctccgaattgttactttataagctaactttattagccttaaaattctaacacagatagggcgggatgtcaagatgcaaagccgccggatttcgggaaaaagcatgtccccacgccatttctgacgtggggacacggaaaataggatatcggagaaatcagttttaaggagtgttttgaatcagtcaccgaaagcctgggaaagatcggcgatgatgtcatcgatgtgctcggtgccgatggagaggcgaatggtgttcggctggataccctgttctgcgagctcttcttcgttgagctgcgagtgcgtggtggaagccgggtggataacgagggacttcacgtctgcgacgtttgcgagcagagagaaaattttgagtctgtcgatgaacgcctgtgcttccttagcgccgcccttgatgttgaacgtgaagatggaagcgccgccgttcgggaaatacttcttataaagctcgtggtacgggctgtccggcagagacggatggttgacgctttcgactttcgggtgcttggagaggaaattgacaaccttcagcgcgttctctacatggcgttcaacgcgcagagagagcgtttcaagcccctgcaggaacaggaatgcgtgcagcggagcgagcgttgcgccggtatcacgcaggaggattgcacggatcttcgtgacaaaggctgccgcgccgacgtcctttgtgaagctgatgccgtggtagctggggttcggctctacgagggacgggaacttgccgctgccttcccagtcaaacttaccgctgtctacgataacgccgccgatcgccgtgccgtgaccgccgatgaactttgtagcggaatggacaacaatgtctgcgccgtactcgaacggacggaggaggtaaggcgttgcgaatgtggagtctacaacaagcggaatcttatgtgcatgtgcaatggctgcgaccttttcaatgtcaatcagcgttgcgttcgggttaccgatggtctcgatgaagacggcctttgtcttatcgttaatcgcgttttcaaaagcgccctctttatccgggtctacgaacgttgcggtgatgccgtactgcggaagcgtgtgctcgagcagattgtaggtgccgccgtagatggtcttcgcggaaacgatgttgtcacctgcgcttgcgaggttgagaaacgtatagttgatggctgctgcaccggaagcgacgccaagcgctgctacgccgccctcaagggctgcaatgcgctgctcaaatgcgtccacggtggagttcgtcagacggccgtagatgttgcctgcatctgcgagcgcgaagcgtgctgctgcgtgtgcggagttcttgaagacgaaggaagtcgtctggtagatcggcactgcgcgggcatcggtagcggggtccgggttctcctgacctgcgtgcagctggatggtttcaaaatggtagttgttatcatatgtatagctcatggtaatacctctttcataatttcagaatttaatttttgttttaacggattttgagaagttgacgaaaagctgagcttcacattcgtccgtttctgaaattgtggcgaagcatttgccggaaaagggatcgcatcatcggggtgcgcctcctttgagatttacttcggtttttatgtttaaggtttcataacactcaaaacatattgacttggtatgttttgtatgatacacgctagattgcaatttgtcaacccctaaaatgcaaaaattgaagaaaatttccggaaaccatactattatatgggggaaactgcattttgcattgcaaagcggcggatcgtttcaacgaattttaaggtaaaggaaaaagtgaaaaaagatgttgacaaatttaccctgtggtgataggatataaacaagctcaataacctataaaataagtaggtttaataagtttagtgaaacaaggcaaaggagagacgcgatatgaacccgtttccgtacagtcggcgatgttgcgccgcagcctgaaacgatacaagaatgcaaactcatttatataaagtattttaaggagactttaccatgcgtgtatatcggaaaatcacagacctcatcggcggcactccgcttcttgaactcaccaactacgaaaaagcaaatgaactgaacgcgaaaatctacgcgaagcttgagtatttcaacccggcaggcagcgtaaaggaccgtatcgcaaaagcgatgttggatgacgccgaggaaaagggcctcttgaagcccggcgcagttatcattgaaccgacaagcggcaacacgggcatcggccttgcttccgttgcggcttcccgcggttataaggtaatccttaccatgccggagacgatgagtgtggagcgccgcaaccttttgaaggcttacggtgcggtgcttgtcctcaccgaaggcgcaaagggtatgccgggcgctatcgcaaaggcgaaggagctcgccgagcagactccaaacagctacattccgagccagttcacgaacccggcaaacccggcggtgcacctgaagacgaccggcccggaaatctgggcagacacggacggcaaggtcgatattttcgttgcaggcgtcggcacgggcggcacgctctccggtgtaggcgcgtacctcaagtcgcagaaccccaatgttaaggttgtcgcggtggaaccggctacctccccggtcctctccggcggcaaggcgggcccgcataaaattcagggcatcggcgcgggctttgtgccggatacgctgaacaccgacatttacgatgagattctccccgtgcagaacgaggacgcgtttgcgaccggccgcgcgctggcacgcagcgagggcgttttggtgggcatctcctccggcgcggcagtctttgcggcagcacagcttgcaaagcgcccggaaaacgcaggcaaggtcatcgtggcgcttctgcccgataccggcgaacggtacctctccacgccgatgtttgcagactgatacagcatacaagaatccaaacacacatctttgggatagaaaaatgaatgagggaaaggggcaaggctttcgggttttgccctttttcgcgggtttaaaggagtttatagagggcgttttcgcagtaaattaccggcaaaaataaaactcttgaaaacctactaaaaacatgttattatggtataaagtttgcggcggacggtgagcccgcttgttttattccggaaacgctattttacataaaggatggataccgcatgaaaatttccaccaaagggcgctatgcgctgcgtatgctgctggatctcgcacagcaccagaatgacggctacgtcgcgctgaaggacattgcccgccgtcagaatgtctccaaaaaatatctggagcagatcgtgccgatgctcaataaatccgatattcttcttgcaagccgcggttttcagggtggatatcgtctggcgcaatcgccggataaatacaccgtgggcatgattctgcgcatcacggagggcagcctcgcgcccgtcgcgtgtctcgatcacgaccccgttctgtgcgaccgcagcgcagactgcatcacgctgcccgtgtggcaggggctcagccgcgccatcaacgaatacctcgacagcatcaccctgcaggatatattggatcagcagcaggcggctttcgtcaacgattacagcatttgataaaaaaaataccgcattcggtttgtaggctgaatgcggtatctttctatttgatttgaaatcactcgccggaatttaacagtgcttcggcttcatctgcgtccattttgtctacgttattctcctttgttttttctcatgttatcacaagtgatttgaaaagtaaacaaccggtctatagttatatgtagaaaagctcccccgaaacgaattcgggagagcttttgtcatacaatgttattatatttgcttgcggacgatggtgtattcgtcgccggggcggtagtacgggcagttttgaaagcggccgccgatgaactgggcggtctcgtcctcgtctaaatccatatcgcagacatagaagccgtactcatcgtcgtactcgtaatacaggcagtcttcgcattttgaggtattttcaaacatactatcgccttacagaacgctttgcaggaactggcgcgtgcggtcgtgcttcggatttgtgaagatctccttcggggagccttcctccaaaatcgcgccatcatacatgaacaccacgcggtctgccacttcgcgggcaaagcccatttcgtgcgtgacaacaagcatcgtcatgccttcttccgcaagctccttcatgacgttcagaacgtcgccgacgagctccgggtcaagggcgctggtgggctcatcgaacagcatcattttcggctccatggcgagcgcgcgggcgatggccacacgctgctgctggccgccggaaagctttgcggggtaggaatcgagcttatcgccgaggccgacctgatttaaaagcttcacggccttttctttggcttctttttccggcacgcccttcacgttcatcggggcgagcatgacgttttgcagtgccgttttgtgcgggaagaggttgaagcgctgaaacaccatacccatctcaagcagaatagcggcgcgctctttatgcggcagctttacctgattgtggccgttcacgcggtcttcgatgagcttgtcgtcgatccagatcttgccgcttgtaggcttttcaaggtggtttaaagagcgcagatacgtcgatttgccggcgccggacggtccgatgatgacgaccacctcgcccggctctacggtgaggctgacgtttttcagcacctctacggagccgaaggacttacagatattttccgttttaatgatagacatagccgtattcctccttattcgtagatggacaggcgcttttcaaggcgattgaaaataacggtgaacacgccggtgatgatgaggtagatgatcatagccgggatataaacgagagcgctcgccttgttggaagcgataatcttcgtctggtaggtcaaatcggtcagcgcgatgatggacacaagagaggtatccttcagcaccatgacgaactcgttgcagatcggcgggatcatgcggcggtaggcctgcgggatgatgacaaggcgcatcgcctgcgagtgggtgaggccgagcgccgtagaggcttcaagctgacctttatcgatggactgaatggctgcgcggatgatctccgcgaggtaggccgcgacgttcagcgagaacgcgatccaagcggccaaaaagcggctctgaatattgaacgccggaacgagctgcggcagcgtgtaatagaggaaaaacagctgcatcagaagcggcgtgccgcggaagaagaagatgtacgcgccgcacacggagcggagtacggtgtttttggagatcttgccgagggcaagaaacacggcgagcacgagtgccgtcagcacggaggtgacggaaagcgcaagcgttacgccggtggcctggagcagcgccggcatccagccgatgatttgttgaatggcgttcatggtgatatcctttccgatataaatggggcaagagacctcaaaacggggcctcctgccgaagtttcattttacgttattgcgcttatgcgtccttctttgtgacgatgacgagctggttggagaggtacggctcggtcatttcatacgcttcctgacgctccggggtgatggaaacgccggcgatgatcatatcgtactggcccttatcgaggcctgcgaaaatgccgtcgaaggaggtgttgacaaactcgacctcaaggccgaacagcttaccaatctcttctgccatatcaacgtcgaagccctggtacacaaggccgctgtcgtcggtgtactcaagcggcggataaccggcctcaaagccgatggtcaaaacgccgtccttaacggtcttgaccttactcgggtcaacggtcggttcctcggtgacgttgcgcacgccctcggtgacatcggtgccgaagtgcttcatggcgagctcggagattttgccgttataataaagcgtgttgatggcgttttcggtctgctccaaaaggtctgtgttgcctttcttgatgcagacgcccatcggttcgccttcgtcgcttttccaaacgctctggaatttggagtcgtcgtctgcgaggtaatacgccgcgacaacgctgtctacgtacacggcatccgcacggccgagcgaaacgtcatcaaagcactgcgtaaccttttcatacggaagaatctcgacgtcaacgccctcttcctgcattttctgcagagcgtcgtgggcagtggtgccggtctgcacgctgattttggcgccggcgaaatcgtccgggctttcgatcttctttgtactggagctgctgcatgcggtggcggagagtgccattacaccggcgagcacggcagcaaggattttcttcattttcatgtgttttgtccttctttctcaattttccccgataatagagatacagtcgtttcactgtaccaatcgattagaatacttgtattctacccccaaaacccgtttgggtcaatagcgaaactgccaaattaatgtatatttatacatatatacataggtatttttcaagatttgtgggtaaaatcggcgtttttacttcaacgtgacaatgacaagctgattcgagacatacggttccgtaaggtcatacgcggcctgacgttccggcgtaatggacacggacgagataatgacgtcgtactgctctttatcaaggcccgcaaaaatgccgtcccacgcggtgttgacaaactcgatgtctacgcccagcacctcgccgagcgcttttgcaaagtcgatgtcgaagccctgatattcaagccctgcgtcatcggtgtattccatcggcgggtagccgacttccacgccgacggttaaggtgccgtccttgagtgttttaagcttagaaaggtcaagcaccggcttttccgtcacattgcgtatgccgtccacatcggcagcggagccgaagtgcttttcggaaagctgcgccatggtgccgtcataatataaggtatcaatcgcaccttcgatgagttctttcaaatcgtcgttgccctttttaagacatacgccgattggctcgccggtttcgctcgtccatgttttctggtatttcgtgtcgtcctccgcgaggtagtaacccgcaacgacgctgtccacgtacacggcatccacgcggccgagtgcgaggtcgtcaaagcactgcgtcaccttttcgtacggcagcacgttgatgttcatgccctcgtcctgcatatcctgaatgctttcgtgcgcggaggttgccgtctgcacggaaattttcgcgccctcaaagtccgccgggctttcaatcttcttcgtactgcccgaacaggccgcaagtgagagcatcatagcgccaattaaaaatgaagcgcaaaccttttgaattttcattttacattcacccttccgcaatatacctttaagctttgacttgtataattttgaagatgaatgtattttacgccgatttcattcaaaaatcaagcgaaataatgcacaaactaatgtatatttatacgtatatacatggtgaattttgaaaaagaaaagcctgcgttgtgcaggggctcgaaatgagaattgcataacgcagacttttaggattcggtttagtccatgtaaccgccttgcatgggggagtgtgccgtttgcgtgaagcgctttaaaacgccgtgcgtgtagcggctcttaaacggtggcagcgctttgcggcgctcgttaaacacgcgctgcacttcttcctcgctgcatttttcgccgttgataccgacgacgcgcagaatacgctgcggaatgtcgatctcgataaggtcgttttcttcgattaaagcgatggggccgccctgtgcggcttccggtgaaatatggccgatggcgggacccttgcttgcgccggagaagcgaccgtccgtcagcagcgcaatactggcagaaagctccgggtcgctcgaaatggcttcggtggtgtagaacatttccggcataccgctgccgcgcgggccttcatagcggatgatgacggcgtctcccggctgaatttggtgcgttaaaatggcgtggatggcatcttcctcgcagttgaacgggcgcgccttcagaagcgccttgtgcatctccttcggcacggcactgtgttttacgaccgcgccgtccggggcgatgttgccgcgcagaatggcaatggcgccgttcgtgccgatggggtcatcgaacgagcggatgatatccgtgcgcttgagaccggttttctttaaataggtatcacacttctcgtagaagccgtttttctttaaatcttccagattttcgccgagcgttttacccgtgacggtcattacatcgagatgcaggtggtctttgatttcctccatgatgcgcggtacgccgcctgcataatagaagtactgcgcgggccactcgcctgcgggacggatattcaaaagataatgcgcgccgcggtgcatgcggtcgaacgtatccgcgtcgagcggaatgccgaactcatgcgcgatggcgggcaggtgcatcagtgtgtttgtggagccggagattgccgcgtgtaccatgatggcgttttcgaacgatttcagcgtgacgatatcggacgctttcatgccctttttcgcgagtgccacggcggtttttccggcttcctccgccgcgatggaaagatcttcgcaggtggcgggcatcagcgccgtgccgggcagcatgaggccgagcgattccgccataatctgcatggtggacgcggtgcccatgaacgagcatgcaccgcaggaggggcacgcgtggtgcttgtaatacgtgaactgctcctcggtgatctcaccgcgctcatacatggcgctgtatttgccgatctgctccagcgttaaaaggtcgggacccgcgtccatcacaccgcccgtcacgaacacagccggaatgttgatgcggccgatagccatgagcagcgcaggcacggatttatcgcagcttgcgaggaaaacgccgccatcaaacgttgtcgcgttggcgtgaatttccacaaggtcggcgatgatgtcgcgcgagggcagggaataattgatgccatcgtgcccctgtgccatgccgtcgcaaatatcggtcgcaaagtaaagcgcacccttgccgcctgcttcgtatgcgcctcggcttgctttctgcgccaaatttaaaaggtgcgcggagccggggtggctctgcccgtaggtgctttcaattaaaatctgcggctttgtgaggtcttcctctttccagcccatgcccatgcgcagcgggtccatttccggcgcaagcttgcgaacttcctgacttttcaacatgttgattccctctttgatgataactttatgcggcagcaaatgcgccgatctcaaaatcggcataagtgccgtctttattttgctttgcagtacagtctaaaaagtaagaggcaccgtccccggcacgccatttttcggcgtcaaacgtcagtgtgccgttttcatcgtttttctccgtgatcttgaataagcagccgtcttcccacaaaagctcgtccgtttctaagtagccctcgtcttgcagctccttaaacgtgaacgtgagcgggcggcgctccgtaagctccccaaaccgccacgcaatcgcctgtatctcgcctttcgtcaacggcgtctcggtcaggtcaacggagacatattcggtgtcgctttgcagcgttttgtccgtgttgaataattcctgcagcacggacaaatacagcgcgcatcgcccgtctgtttcgccctcacgcacggtgatcttttgcacgtcatcgggttcgcttgggtaaatggctttgatatagccgccgtaggtgacgtccaccatcatgccggggatgaggtcattcggcgcgtcctccggccttgcgcagcggtacacgccgtcgtcttctccggcgagcaaaagcaggttgcccgaaatatcgacgaggcgtgcggtgagcgttgcagtctcggccgcgctcggttctgatgcggtactttgcggttcatctacgccgcccgaggatgccggtgcgctttggcaggcggtgaaaagcagaatgatgcacaaaagaaaagcgaataaatgggtttgtaaacgggtcataaggccagctcctttcactttatacgtaggaaaaggggttcattcggttacaaaatcatcatagcagatttagaagtctgttacaagatacaaatactttttgttttgacttttgtgcttaaattgtctatactgtgtacaagttgacaaaaagggagcgaaagctatgcggcaggtagttgtaaatgatttggtgttcggcagcggcagaatgaaaatttgtgtgccggtgtgcgagaagacaacggaagcggttttagacgccgtaaaagaggtcaagaccactccggcggatcttatcgaatggcgcatcgattattttgacgaggacatgtttgcggccgcgccggaaatttttaaagcagccgcgccgttgcccgtgctgtgtacattccgtacaaaagcggagggcggcgaaaaagcgatagatcccatggactattttgcgatgaacgcgcagctgagcgccttgggtgcgccgcttgtcgatttagagcttttcctttgcgagcagtacgatgacattgcaaaggcgaccgttcaggctatgcacgatatgggtacgaagcttattatctcgaaccacgattttgccaaaacgcctgcacgcgaggaaatcgccgcccgctataagcgcatgatggcgttaaatgccgacctgccgaaaatcgccgtgatgccgcagaatgagcgcgatgtgatggtgatgctggcggcgatgaatgaatccactgcgttctgcgggccgctcatcggcatttccatgggcgagctcggcaaggtgacgcgcgtgcgcggcggggcgttcggctctgtgatgacgtttgcgtcaaaaggaaaagcctccgcaccgggacaaatcgatgcagagactttatctaaaatgctgaatgaaaattaaggtttagaagtgcttttcaagcgtgaacacggtcttcacttcgccgacgggcgtgtcgttgtcgttgacggtgacgccgttgttaagcgagacgagcatcttatcggtatcggcgttatagtagccgatctggcggaagatctcgcggatgatgagcggccagaccgcctcggtgccgtccttaatcttgaaggagatgccgatgcgctcctttttaaggccgatgccgtacacgctgttcgcgccgccctttgcgatgatgttcgcatcgtggttgatgagggagcacaggtagcccgtgccgcgcatcatgtgcggatattcatggatacgcgggacaaagcggcgggcagcgtcctgcagaacgtcgtcctgaatggtatcgatgcacgcgaggttcttatatgccgtcgcgatgttcttcatcgggtaagcgaacaccggcacgccgcagccgtcgatgccgatgacgaccttttcttccgggtactcggagagcacgctcatggtgcgcagcacttcgttctgtccgacggagccgaccttccagtaatccttcacatcgccgcccatttcacgctgggtgagcatgagcgccgcgtgcttgccgctgcagttgtggtagagcttcgacttcggcagaccctgacggatgcgctcttcgtttgcttccgtagagcccggcacggtcggcttcatgatgaggtcttccgggtttaagtcggcctttttcatgatggatttcaaagcgttgatgtggaagctttcgccgagatgcgagcctgcgaacagcacggtttcttcatcggtaaaaccgtatttttcgtcgaggtgatgcgcgataacgggcagcgcctgcacgggctttgaagcggagcggtagaaaaccatggcctccgggtcgcctgcggagtagatgaccttgcccttttcatctacaatgctgatgtagccgtaatgcgtcaggtccaaaagcccgccgcggaattcttctgttaaacgaacggtatctgacataatctcgtcccctgtctttagaatttaacgatttatctttctttttacgttcaaaactattataatcttttttagaggattgtaaaggcatttgtgtgagaatagtcaaaagtgcagaaagcggcgtgttttaaagcgccgcagataggacaaataaacgaaagttggtataaatatgaaagaaaaagtattgtttgaggtttgctgtggctgttttgaagacgccgtacaggccgaaaaaggtggcgcagaccgcattgaactcaattccgcgctgtttttgggcggccttacgccgagcatcggcacggtgcaggccgtgaaaaatacactgaaaattcccgtgatgtgcatggtgcgcccgcgcgagggcggcttttgctacacggatttcgattacgagacctgctgccgcgatatggaagcactgttaaatgcaggcgcggacggcatcgtcttcggctttttgaagccggacggcacggttgacaccgaccgctgcgccgattttatcgggaaaatcaagaaaatcaacccgaacgccgagattgtgttccaccgcgccattgacgtggtgccggacgtatttaaagcgctcgatgatcttattgccctcggtgtaacgcgcgttttgacgagcggccagcgcgaaagcgcgataaagggcgcgaagactgtgaaaaagatgatcgaatacgcaagtgaccgcatcgatattctgcccggcggcggtatcaacacgcagaatgtcggggaatttatcaacgagaccggcacgcacagcgtacacgcctcggcgcgctccctgcggcacgacacaagcgtctgcggcaacccggagatctttttcggcggcaaattgaacggcgttggtatcccggagagcgaatataaagtgacggacagcgctttggtgcaaaacgtcgtcgcagcgatcgaagcgcggtaagctttacccggagaaaggggattttaggtgaaaaacgatattgacagcattttggacgcactgttttccggcggaaagctgaacgtgggcagcggcacgaaaagccgcgccgcaaaagacgccgaggattttttgaacagcatcgaaaaaacgaatgccaacatgcagagcagcctgaatcggcagatcagcgacctcgataagctgacgagcgacgcgcagcgcagcatggacgaaatgcgccgtctgctggacgccgagggcctgaccggcacgcccgaaatggaagcgccgaaagcggaggccgcagaaaaaaagtcgaaggcaaagggcgcggaggagccgccgcaggaccccgcgcagtcgttccgcgaggcgagggaagcgacgggcagaacggtcattgggcaggacgcatttttggacagcctgttcaccgcatttcgccgcccgagcgtgacggggcgcgaaaacggcaagcccgcggcgatcgtcgtgatctccggcaaagagggcacaggcaggcacagtgcgcttgcggcttcggctgcggcgctttgcaaagagggcgttttgaaaaacggcgaggtcacgaatatcgacctttcccgctacccgaacgccgaagacggtaaattactcacacaggatcttttttccgcgctgcacagcgaaaacgatattgtgctgtttgaaaattttgagcagtgccacaaatctttgctgcccatggtggcggcgctgtgcgagacgggcgttttaaaattagcttcgcgttatgctttgcagaaaggcatgctcatcgatgtcggcacggcgcttgtacccgatgctgtcagcgaaatttccgtaaacgggaagtacctcgtttttttgacgagccaaaaggacagcgcgttcaccgatgcgttcggcgcggcatttttgtcctccgtcacggatttctgccgcacggcggaattcacgcgcgagagcctgctcgagatcggcgaagcggcgctcggtgcattaaacgaccgcacaaaggctaagctaaactacacgttcacgttcggtgaagatgcctcagcgtttttggcggataaattcagtcgccgcgacggcgtggagagcatggcgcggctgacggaacgttgcttccgccttttgagcgaagaaaagctgcgccgcgcggaaaaggacggtgaaaagaccgtttccggcacactcggcgtaaaagacggtgtgctcgtgttcacatttccggattttgccgtcacggtggaagaagagaaaaagcaggcggcagacccgaaagctgccgaagaagtgaaatcggagcttaacgagatcatcggacttagtgaagtgaaggactacgtgctgtcgcttgagcagaactatatcattcagcggctgcgcgaagcgcgcggcatgaaggctgatgtgcccgccatgcacatgatctttaccggcaatcccggcacgggcaaaacgaccatcgcaaggctcgtttcacgctatttaaaagccatgggcgtactgagcggcgggcagctgattgaagtcacgcgcgccgaccttgtaggcaaatacgtcggtcacaccgcaccgctcacgcagcaggtcattcgctctgcgctcggcggcgtgctgttcatcgatgaggcatattcgctgtaccgcggcgcagacgacagtttcggactggaagccatcgataccatcgtcaaggggatggaggaccacagagaagaccttatcgttattttggcgggctatacaaaagaaatggaggagtttctcacggcgaactccggcctacgctcgagattcccgaatatcatcgagtttccggattatacggcggaggagctgctggccattacaaagctgactgcaaagaaaaagggctatacgattgatgaaacatgcgaaacgccgctgcttcaatattacgaaaagcggcaggcaacggacgccagaacggcgggcaacggacgcttggtgcgcaatttggttgaggacgcgatcttaaaccagtctcgcagattgacgggcggagacgtgacaaggctgacggaagcggagcttgcggcgcttttaagcgaggattttgacctaagcgaaggatagaaacggtgtgaaaccgcacgaaaatgatgaaagtgtaaacatttatcgatttctcttgcaacttttaaaagaaagatttacaatacaagattggagagaccgaaagtttcagtaaacttccattctgtgataagcgaaagacaaccgagcgaataaagtttcgcccgccttttcaaaggcggcggatcccaagggcagcgcctttggtcgctttccgcagaaagcgaattgcgcggtccctccaagagcgtttatccaaaccgtaaattattgcgaaagggcatgagaatatgacgaaaatcgatattttttccggcttcctcggcgcaggcaaaaccacgctgatccgcaagctgatctccgaagcttttaagggcgaaaagctcgtcctcatcgaaaacgagttcggcgagattgccattgacggcggctttttgcaggacgccggcattgaaatcaccgagatgagccagggctgcatctgctgcagccttgtgggcgacttcggcaaggcgctgcgtcaggtgctggagacctaccacccggaccgcattttgatcgagccgtccggcgtaggcaagctgagcgatgtgatccgtgccgtgcagaacctgcacatggaagacgttacgctgaatagcttcaccaccgttgccgatgcaaacaagtgcaaaatgtacatgaagaacttcggcgagttctataacgaccagatcgagcacgcaaactccatcattctgagccgcacggacggtatcaagcccgaaaagcttgaagcctgcgtcgctctgctgcgcgagcacaaccagaacgccaccatcattactaccccgtgggatcagctctccggcgcacagattctcgagacgatggagcacaagaatacccttgaagaggagctgaagctccttgccgaggagaccgagcacgagcaccaccatcaccatgaccatgatgagcatgacgagcactgcacctgcggctgccatgaccatcatgacgatgacgatgaggacgagcacgagcaccaccatcatgaccacgaagagcatgacgagcactgcacctgcggctgccacgaccacgatcacgaccatgatgagcacgaccacgagcatcatcaccaccatcatcatgccgacgaggtgttcacaagctggggcaccgagacgacccgcaagttcacgaaggacgagatcgagcacatcctcgaggagctcgacaacagcgaaaagtacggtatgatcctgcgtgcaaagggcatcgtcgcaggccgggacggcgagtggatccactttgactacgtgccggaggagacctctgtgcgcaacggcagcgccggtgtcatcggccgcctgtgcgtcatcggttctcacatcaacgaggccgcgatcgaagcgctgttcgcgtaatgcgggctgaaccttacagaaaggcggaatatggatggatgatatgccggtttacctgtttacgggttttctcgaatcaggcaagacctcttttatagacgaaacgcttgcggataagcgtttcaataacgggcagcgtaccttgctgctcgtctgcgaggaaggcgaggcggagtacgacgagtcccgcccctacatgaagaacatctatgtggaaaacattgaggacgaagacgagctgacgagtgaaacgcttgacatcctcgcgaaaaagcatcgcgcttcccgtgtgctcatcgagtacaacggcatgtggcagttgaaaacgctgtacgacaacatgccggaaaactgggcggtctatcaggaattcatgttcgcggatgcgacgacattcctcacttacaacgccaacatgcgcggccttgttgtggataagctctccggctgcgagttggtcgtgttcaaccgcttcacgaaggacatggacaaaatggcgttccacaagattgtgcgcggcatcagccgccgcccggacatcgcctacgagtacacgaacggcgacgtcgaatacgacgagatcgaagatccgctgccgtttgacatcaacgcgccggtcgtaaagattgaagacggcgattacgcgctgtggtaccgtgacctttccgaagacccgaagaagtacgacggcaaggtcgtcgagtataagggccttgcagccgtgaacccgcgcatgaagccgggcatgttcttcttcggtcgccagctgatgacctgctgcgtggaggatatccagtttgcgggtctgctcacgctgtgcgacgcggacaaaatgccggaaaacgggaagtggtacaccatgcgcctttccgttgcgtataagtggcacaagctctacggccgcaagggtccggttctgacgcttcagaacatcgagcctgccgaagcgcccgcgcagcccgttgcgacgttctattaagcttaaattcattgcccgttggcttttcaaaagtcggcgggtaatttttttatttatttttctgtatacggtgtcgaaagtgcgcgatttatggtatactaaaaattacttaaatatatgaaatgaaaatggtgataactttgcatacatatcagcttgttttgccctgccttttgggtgttgagggtcttgtagcggaggagctccgcgatatgggagcggaaaatgtcgcgccggaaaacggacgtgtgctgtgcgcaggctccccggagatgatcgcccgcgcgaatatccgctcccgctttgcggagcgcgtgctcgttttgctcggtacatttgaagcgaaaagctttgaaagcctgtttcgcggcgtgaaggccctgccgtggacggagtggatcggccgcgacgacgcatttccggtcaaggggcggtgtttatcgagtcagctcatgagcgtgccggactgtcaggccattatcaaaaaagccgtggtggaaagcctcaaggaggcgtataagctggagcatttcccggagacgggcgcgaactaccagatccagtttttaattatgaaagacaaggtcagcattatgctggatacgagcggcgcggggctgcacaagcgcggctaccgcaaaaattccaacgaagcgcccatcaaagagacgcttgcggcggtcatggcaaagctttcccgtgtgcgtacggacggcacgctcatcgaccctttctgcggttcgggtacgattttaatcgagggcgccatgcttgccatgcacattgcgcccggcctgcgccgccactttgcggcggaaaagtggaaagccgtccccggaaatatctgggacaacgagcgcattgccgcaaaggcacttgaacgtcgcgatgagggcttcttggcgttcggctatgacattgaccccgaagccgtgcgcctgacgcttgaaaacgcgaagaaagcgggcgttgcgcagtatatctccgcagaagtgcgcgacatcaaggatttcagcaacgacggcccgttcggctgcgtcatctgcaacccgccgtacggcgagcggcttttagacgtgaaaacggcggaggacatctacaaaacgatggggcgcgtcttcacgccgaagcgcggctggagctatgctgccatcagtccggacgagcggtttgagacatgcttcggcaaaaaagccgaccgccgccgcaagctctacaacggcatgatccgctgccagtattacatgtattttaaggcataaaaaatgctttaggggagggtacatatgcggaatgtttatatcatcaacccaaaagccggcaagcacgaccataccgtgcagtttatggagcgcatccgcgccgtgcatgccacgcacggggaagagccggaaatttacctcacacagcgcgcgggccatggcgaggagctggcaagagcggccgccgaaaagggcgatgcggtgcgcatttgggctgtcggtggcgacggcacggtgctggaggtcgtgcgcggtgcggagtttcacaaaaacgtcgccgtgggcgtatacccgtgcggcagcggcaacgacttcgtgcgctcattcggcaagcgcgaagtgtttttgaatccggaaaatcagctggcgggcaagactgtgtccatcgatatgatccgcacgcagcacggcgatgccgtgaatatctgctctgtgggttttgacgccaaggtggcggcggagatgaattattataaacacctgccgttcgtttcgggcgagcttgcgtataccatttcgcttgcaaagtgctttttggggcaccttgcggacaaaatgaccgtaacgttttactatgcggacggcacaaaagagaccgttacgggtgaatttctgttcacgcttgcgggcaacggtcgctggtatggcggcgggtactgcggcgcgccgaactcggtgatagacgacggtctgctcgattttgtgctgatccgaaagcccgcctatttccgcattccgggtcttgtgccgaagtataagcgcggtgagcatttaagcaacccggcgttttccgacctgctcgtttaccgccgcggcgtgaagatcgaaattcaaagcgaaaatgaagtcgtcagcaatatggacggcttgtgcatcaaggtgaaaagcgaggaatacaacattctgccgcacgcactgaatttcattttgccgcacggcgcggcattgccgaaggagccgaaaaatgcgcggtgatacactcggaaaagcggaaatcttaacgccgcgcctgcgccttagacgcttttccatgcaggacatgagcggctttctgctgtttgctgccgatgcggataccatgctgcgggcgggctccaagccggtttctacaccggcggaggcggagagtgaattgaggcgcgccgcagacgacccgtatgcctttgccatcaccctgcgcgaaacgggcgaagtgatgggcaagatcaagtaccagcgcgattactgccgctataatacggacagtatttcgattggctacgagctttcgcgccgctaccgccataacggctacatgacggaagcgctgcgcgccatggtgcagaacgcgtttgaagtgatgaacgtcgaggtcgtcgccatcagccactttgtgggcaacgagccgtcaagaaaagtcatcgagcgcgcgggattcatctttgagggcgttatgccgtgcggctttaagcggtttgacggtgaaatttttgacaatgtgtgttactccatcctgcgttcggagtacgatacggggctcatttcgtccgtgcgacgcatgcggtaaagcttacaaatcaatgtgcatgcccatattccgtcagaaaattgtggaaataccgcttttttctattgccaatgtacaaaagcggtgctaaaattgaataaatccaaaaactgtgactttgttgtgtcttgcaccggcaaagtctgttttttaacgcgaaagaaaggaaggaataaagatggaacagtcttttccgaagcgcccgttccgtacgcacggcggcgcgcatgtgccgcaccacaagaacacggcgcataccgaaacgcgcgtgatgccgccgcccgatgagatcacgctgcccatgacgcagcacatcggcgcaccgtgtgtgccctgtgtgaaaaagggcgaccacgtgtatgtcggcaccaaggtcgcggacagcgacgcatacgtttccgtgccgatccattcctcggtttccggcaccgtgaaggagatcaaaaaagtcattatgcccggcgggcaggcggtggacgccgtcatcatcacgtcggacgggttaatggagcacgaccctgcggtatgtcccccgccggagatcaaaacgaagcagcagttggccgatgcggcgcgcgcttcgggtctcgtcggtctcggcggcgcaggctttccggcgcacgtgaaattaaacgtccccccggacaaaaaaatcgatacgctcatcgtcaacgttgcggagtgtgagccctatattacctccgaccaccgcgaggcgctcgaaaacggcaaaaacgtgcttgccggtatttataagatcaaagagattttagacgtgcaccgcgtcatcatcgcgattgaagacaataagcccgacgccatcgaagcgctgacgcgcattgcagatgacccgaaaatggacccgaacgacgaagtgcgcgtgttaaagctgcatgcaagctacccgcagggcgcggaaaaggtgctggtgcaggcggcaacgggcagaaaagtcccggcgggcggtctgccggcagacgtgggttgccttgtcatgaacatcggctccgtctcgttcctcgcaagctacatgcgcaccggcatgccgctgacgatgaagcgcgtcacggtggacggcagcgccgtgcagaacccgcagaatgtcattgtgcccatcggcacaaaaattcgcgaggtcatggaattctgcggcggctataaggaagaaccgcagaagctcatcatgggcggcccgatgatgggcgtcgccgtgacaaccgacgagctgccggtcttaaagcagaataacgggttactcgcgttcggtgcggaagaagcgcgccttttggagccgaccgattgcatccgctgcggccgctgcgttgcggcatgtcccatgaaccttgtgcccgcaaagcttgaaaaatacgcggagcgcaaggatgtggaaatgctgaaaaaactcgacatcatgacgtgcatggaatgcggctgctgcgcattctcctgcccggcgaaacgccgcatcgtgcaggccattcgcctcggcaaatactatgtaaagaaggaggcggctaaaaagtgaacaaattcatcgtttcctcctcgccgcactttcagtcaaaagacaccacccagactttgatgctggacgtcattttggcgctgaccccggcgatgattgcgtccgtcatcattttcggcttccgcgcggcggttattatcctgacaacggtcgcgtcctgcattttgagcgaatacatatcccgccgcgtcatgaagcgccgccagacggtcggtgacctttcctgcgttgtgacgggcgttctgctcgcgatgaacctgcccgtttccatcagtcccatcattgcggcgttcggcggcgtcatcgccattgttgtcgtaaagcagatgttcggcggcatcggacagaacttcgtgaaccccgcgctgacggcgcgtatcattctgatgaactcgttcccggcgaaaatgaccgcgtggacagcgccgatggaccacagcttctccgacgccatgacgaccgcaacgccgctcggcgttctctccgagggcacgggtgcggcgctgccgagctacctcgatatgttcctcggcaacacaggcggctgcctcggcgagacctgtgcacttgcactcattctcggcggcatttaccttgttgcacgccgcgttatcagcccggttatcccggtcacgtaccttgcaacggcaacggtgctttccgcactgctcggccgcgacccgctgatggatattctttccggtggcctcttgctcggcgcgattttcatggcgaccgattacaccacaagccccatcaacttcagcgcacgcgtcatctatgccgttggctgcggcgtgctgacaattttaatccgccagttcgcgtctctgccggagggcgtatcgtactccatcgtactgatgaatattttagtgccgctcattgagcgcgttgcgaagccgcagacattcggcaaaatgaaggcaaagaaagcgggtgacgcaaaatgaagatcaccgcgaaagatattttaaaaccggcgctcattctgtttgtcatttgccttgtcgtcacggcgcttctggcgggcacaaacctgctgacgaaggataaaattgccgagcagtccgcactggaagcggagcagtcgagaaaagtcgttttgagcgacgcggacagctttgaagaagcggacggctattacatcggcaaagcgaataacgaaacggtcggctacgttttccaaacggaggcgaagggctacggcggtgcggtgaaggtcatgaccggcatcagcgccgacgggcagatcaccggcgttgtcattctggagcacagcgaaacaccgggtcttggcgcgaacgcggaaaaggcttcctttacggatcagtttaagcagactgcgccggaaaagggcatcacgcttgtgaagaataaggcgccgtcggacggcgagatcgaagccatgaccggcgcgtccatcacgagccgcgcggtgacaaacgccgtcaacgaagccatcacaaagtacaacacggtaaaggagggcgcataacatggcaaaaagcctcaaagaagaatttacaaaaggcattatcaaagagaaccccgtgctgcgcctgatgctcggcacctgcgcgacgctcgccgttaccacggcggcctcgaacgccatcggcatgggccttgcgacgacgttcgtactcgtatgttccaacgccgttatttctcttctcaaaaaaatcattccggataaagtccgcattccggcgtacatcaccattgttgcgggctttgttaccattgtgcagctgctcatcaaggcctacgtgccggcgcttaacaagtcgctcggcgtgttcctgccgctcatcgttgtcaactgcatcattttgggccgtgcggaaatgttcgccagcaaaaatcccgtgctgccgagcatcgtagacggtcttggaatgggcgtgggcttcaccgccgcgctgctcgccatgggcatcatccgtgaattgctcggcgcgggtaccgtgttcggcattccgctcctctcgaatttcatggatcccatcatcattttcctgctcccgccgggcggcttcttcgtgttcggtattctcatcgccattgcgggcaagctttccgcggagggcaaagcgccggagaccatgggctgcgctgcatgcccgttggcggcttcctgctccaaggtacaggaaaaatgtgaaaaggagggcggcaaagcatgagtcttaaatttttagtcggcattttccttgccgcaatcctcacggagaactatattctcaataagtttctcggcatctgtccgttcctcggcgtttccaaaaagctcaatacggcgttcggcatgagctgcgccgtaacggttgtcatggttatcgcgacggcggtcacatggccggtgtatacgtatgtacttgtcccgctgaacctcgattatttgcagaccgtggtgttcatcctcatcatcgcggcgctcgtgcagcttttggagaccgtgatgcacaagtatatgccgccgctgtataacgcgctcggcatttatctgccgctcatcacgacaaactgcgccgtgctgggcgtgacgatgctcgtgctcgaaaaaggcgcggaaaacccgagcttcggctatttggcatcgcttgtcaacgcattcggcgcaggcatcggcttcatggttgcaatggtcattttcgccggtgtgcgtgagcgtctcgagctgtgcgacgtgccgaatttcctcaaaggtctgccaatcacactgatcgccgcgtcgcttgtggcggtttcgttcctcggctttaacggcataatagaccgtctgctcgcctgagcaaaacgaaaggggtttctatatggataaaattttgatcccggttctgatcgtcgcgggcatcggtcttctggcgggtattattctggcggtcgcctccgccatcatggccgtgccgaaggacgagaaagcggaagcgattttagaggtgcttccgggcgcgaactgcggcgcgtgcggtttttccggctgctccggctatgcggcggcgctctctaagggcgaagcgcagcccgggctgtgttctcccggcggcgaagcgtgcgccaaagcgtgcgcagagctgcttggcacgggcgatgttgccgtcgagaaaaagacggcgcttgtccactgcatgggcagctatgactgcaccagcgacaaaatgcgctacgacggcatcgatagctgcgccgcatctaccctgcttgccggcggtatctccagctgccgctacggctgcatgggcatgggtgactgcgccgccgtgtgcgaatacggcgcaatcaacgtctgcaacggcatggcgtcaatcgaccccgcaaagtgccgcggctgcgcaaaatgcaccgctgcatgtccgaaggggctcatcagctttgtgccgctgaaaaagcaggcggtcgtgcgctgctccaactgtgataagggcgcagagacgatgaaggtttgcaaggtgggctgtatcggctgcggcaagtgtatgaaggcgtgcgaagcgggcgccgtaaaggtaacgaacttctgcgcgaaggtcgatcccgcaaagtgcatcggctgcggcaaatgtgccgaggtctgcccgagacacgtcatcaccatgctggacgcgtaatttttgaaacaaaccgagcctcggctgtacgccggggcttttttgttgtcaaaatttgcaatccgctctttacaaatctctgaaaatccgttatactatacaaaacacggttcaccaaagttttttctgcggtgcgccgcaaaacagctttttcgttctgagcacaaggcatcgccgcgtgtaagccgaaaatggatagaggtatattccgcagatagattctgcgctttttgtgcttcctgcattttcggcagggagcatttttgttttgtttgttttataaaaacgggaggtgttttatgcagacacgcgtagccgtgatgagcattattttagaagataacgcccacgcggaagaaatcaacgacattctgcacctgtacggtcggtacatcatcggacgtatggggctgccgtacagacagaagaatatcaacatcatctgtgtggcggtggatgccccacaggatgtcatcagtgccatggcgggaaagctcgggcgcgtgcgcggcgccaacatcaaaacggcgtattccaatttcacgagcacagagccggaaatcaaaacggagtgatccgaaaaaacgactaacgggaaagtgaactgacccgaaagaaaggaaaattcaaattatgtacgatccgaaatccttaaaagcagaggaatttatctgccacgaagaaattgaagacactttaaaatacgcagacgagaacaaagacaacttgccgctcatccgcgaaattctcgataaagcccgtctgtgtaagggactttcacaccgcgaagcatccgttttgctcgcctgcgaagacccggaaattctggacgaaatctataagcttgcaaacgagatcaagcacaagttttacggtaaccgcattgtcatgtttgcgccgctgtacctttccaactactgcgtgaacggctgcatctactgcccgtatcaccgccagaaccatcacatcccgcgccgcaagctgacacaggaggaagtcgcaaaggaagtcattgcgctgcaggacatgggtcataagcgccttgccattgaagccggcgaagacccggtgaataaccccatcgagtacattctcgactgcatcaagaccatttacagcattcagcataagaacggcgccatccgccgcgtaaacgtcaacatcgccgcgacgaccgtggaaaactaccgtaaattaaaggaagccggcatcggcacgtacatcctgttccaggagacctaccacaaggaaagctacgaaaagctgcatcccacgggcccgaagcataactacgcctaccacaccgaggcgatggaccgcgccatggagggcggtatcgatgacgtgggtctcggcgttctgtacggccttgaaatgtaccgttacgagttctgtggccagctgatgcacgcggagcaccttgaagccgtgcacggcgtaggcccgcataccatcagtgtgccgcgccttaaaaaagccgacgacattgacccgacgaagtttgataacggcatcagcgacgaaacattcgcgaaaatctgcgcacttattcgtatcgccgtgccgtacaccggcatgatcatctccacgcgtgagagtcagaaggtgcgcgcgcaggttatcaacctcggcgtttcgcagatcagcggcgcatcccgtacctccgtcggcggctatgccgaagaggagcgccccaccgacaccgagcagtttgacgtttccgatcagcgctcccttgacgaggtcgtccgctggctgatggagaccgaccacattccgtccttctgcacggcatgctaccgcgagggccgcaccggcgaccgcttcatgagcctgtgtaagagcggacagatccagaactgctgccacccgaacgcactcatcaccttaaaagaattcctcgaggactacgcttccccggagacgaaggccatcggcgaaaagatgatcgcgcaggagcttgaaaatatcccgaacgagaagacccgcagcatcgcaaagggctatattgaaaaggtcgcccacggcgagcgcgacttccgtttctaaaactttcggttattctttaaaaggcaggcgacttctatggcagacctcaaccagaccccctcggcaaaccgtgtgcacatcgcatttttcggcaagcgcaacgccggtaaatccagcgtggtgaacgccgttacggggcaaaatatctccattgtgtccgatgtcatgggcaccacgaccgaccccgtgcagaaagccatggagcttttgccgcttggcccggtcgtcattattgacacgcccggcatggacgacgagggcaccgtgggcgagctgcgtgtgcagcgcgcccggcaggtactcaataaagctgatattgcggtgcttgtcatcgacggcacggtcggcaaaagtgcggaagacctcgcactgcaaaagctcatcgagaaaaaaggcgtgccgtatatcatcgtattgaataaagccgacctcggcggcttcaaagatgaaaatgacaacgaaatcgcggtcagcgcgaagacgggcgagcatatttttgagctcaaggaaaagcttgccgccatcgctgcaaaggggcagaacaccaaagttattttgggtgacttacttgagcgcggcgaccacgtggtgctcgtcacgcccatcgattcctccgcgccgaaaggccgcatgattttgccgcaggtgcaggccatccgcgacattctggacgcgggtgcaacatgctctgtcacgcaggtggaagagcttgcggacgtgctaaacggcctcaaaacgccgccgaagctcgttgttacggacagccaggcattcggcaaagtaaagcaggtcgtgcccgagagcattaagctcacgtcattctccatcttatttgcgcgctacaagggcgttttagagacggccgtgcgcggcgctgcggctattgagaatctgaaagcgggcgaccgcattttgatttccgaaggctgcacgcaccaccgccagtgcggcgatatcggcaccgtgaagctgcccgcgtggatccgcaaacacaccgtcaaggactttgaattcgagtttacctccggaggcggatttcccgaagatctttcgtcgtatgcccttattgtgcactgcggcggctgtatgctgaatgaacgcgaaatgcagttcagacagtcttccgccgaagaaaaaggtgtgccgtacacgaactacggcattctcattgcatatatcaatggcattttaaagcggagcttagccccgtttgacgaatatgcctctatgatttaagttgtcatttgcaaaagacagtcccggctttcaaacgagcgcggggctgtttttttgtcgttttgtgggtggttttgtatgaaaaaagcggacatcagaggacatcggaggacaaaattattacggaactgttaaaagtcaaaaaaatcgcgttttccctattgacttttcttgaccaagtgattagaataggtttagcactcggggataaggagtgctaaagtgtaagcagcacagctccccgagacctaaacttgtatttctttaccgaccgggccgcaccccggcgggtttcgcggcgcaccccgctgtacgcgaaaaacttatttatgaactgcggggagaaaggatacggcgcattaggcgccgaggtggaagttatgaccattaagcctttgacagacagagtactcattcaggccgagaaagcggaggagaccacaaagagcggcatcgtgctgacaagcgcggcacaggagaagccgcaaatctcccgtgttatcgcagtaggccccggcggcatggtagacggcaaggaagtcgttatgcagcttaaggccggcgaccgcgtcatcaccggcaagtacaccggcacggaagtgaagatcgacggcgaggaatataccatcgttcgtcagtccgacgttctggcagtcgttgagtaatttgagtttcagtctttatttttgatatttggaattgtgaggtaatttattatggcaaagcagatcatttacggcgaagaagccagaaaagcattgctcggcggtatcaacaagcttgcagataccgttaagatcacccttggcccgaagggcagaaacgttgtgctcgataagaagttcggcgcaccgctcatcacgaacgacggcgtgacaatcgctaaggaagttgagcttgaagatccgtttgagaacatgggcgcacagctcgtgaaggaagttgcaaccaagacgaacgacgttgcaggcgacggcaccacgaccgcaacactgcttgcacaggcactcatccgtgagggcatgaagaacgttaccgcaggcgcaaacccgatggttctgagaaagggcattcagaaggcgaccgagacagctgttgaggcgattgagaagaacgccaagaaggtttccggcacgaaggacattgcacgtgttgcggctgtttcctctgcaagtgagcagatcggcaacctcatcgccgacgcgatggaaaaggttacgtccgacggcgttatcaccgttgaagaatccaagacggctgagacgtacagcgaggtcgtagaaggcatgatgttcgaccgcggctacattacgccgtacatggtcaccgataccgacaagatggtcgctgtcatcgacgacgcgtacatcctcatcaccgataagaagatttccaacattcaggagattctgccgctgctcgagcagatcgtacagtccggcaagaagctcgtcatcatcgcggaggatattgagggtgaggcgctgaccaccctgatcctcaacaagctccgcggcacgttcacctgcgtgggcgttaaggctccgggcttcggcgacagaagaaaagaaatgctcaccgatatcgcaacgctcaccggcggccaggtcatctccagcgagcttggccttgagctgaaggataccaccgttgatcagctcggccgtgcacgtcaggtcaagatcgacaaggaaaacaccatcattgttgacggtgcaggcgacagcgaggctatcaagagccgtgtcaaccagatcagaagccagatcgagactaccacgtccgatttcgaccgtgagaagctgcaggagcgccttgcaaagctcgcaggcggcgtagcggttatcaaggtcggtgcggctaccgaggtcgaaatgaaagaacagaagatgcgcattgaggacgctctggctgcaacgaaggctgctgttgaagagggcatcgtcgcaggcggcggcaccgcactcatcgatgcgattccggctgttaaggcctatgtcgattccgttgacggcgacgagaagaccggcgctgccatcgttctgaaggctcttgaggagccggttcgccagattgctgcgaacgcaggtctggagggctccatcatcattgagcacctgaaggcaaagaacaccgtcggctacggctacaatgctctgaccgatacctacggtgacatgatcgacgaaggcatcgttgacccgacgaaggtcacccgttccgctctgcagaacgcttcctccgtggcttccaccgttctgaccaccgagtccctcgtggcagacatcaaggagccggctgcacccgcagttccggcagcaccggacatgggcggcatgtactaatgaagagcgcttaaaccgcatgaaaacgtcataaaacgttgatcccccgcacaggaaattcccctgtgcgggggatttttgtaggaaaacacaagtttgtgcgatgaaatatgggattccgccgattgacaatgcggtgcggttttgatactattacagtagataaatatttaacaataccgaggcgggtacgatttcggtacgttcaaaaaagccttggtacggcggctttttaagccgaaaaaaggcaaggtgatcgtatgaaaaagtatgtaagcttggtgttgtgtctgctgcttgcagcgctgctttttacgggctgcgcgggcggaaacggcgggtcttccggcggaggaaagacatcggacgcggcggtgaatgaagcgctgctcggatgcttcggaaagtctgcggatgaagccgtgaaagcgctgggactgaaggacgaccaaaaggccggcgactacggctacacgctggactacgcgtggggcgggcaaacgatggaaaccaatcttgccacaaactacggcggtgcgggtgtgttcggctatgcggaagcgcagaagatgtttgaaaacagcgatgcgggcacggcagaaattaaagcgtttgtggagaaattcacggcgcagtttaacgacccgtatgccgtgacgtgctacacgcaggcggaaaagacgaaagaaacgtatgacgcggcgcagcttgaaacgtatttgaaagatgtggcgggcggcgaaagcggcagcggcgtgcagctccggttcagccttgcgggtgaaaacgaccgcatgagcgacgacggcgattatattgaagtttccgtacagaatacaggcgacgggctgcgcgtgaagctcagcatggagcatgtgaatcgataagaatatggaagccgcgctcgacagaatcgggcgcggtattttataatctgtgtaaaatatttttccgggaaagaaaaacctcttgcatattttatgaaaatccgatatgatgaggatagggagcgcgggcgcctgaacgggttgggtgcgtgtatgcggcttccgctttgagaaagggggaatgattttggaaaccatgatctgggtggcggtcattgtgattgctgcaatactggagggcatgagcgcgcagcttatttccatctggtttgtgggcggcggcatcgccggcatgatcgcgcagctgtgcggcgcgccggtttggctgcaagtgctgattgccgctgtggtgacgctcgttctgcttttggcaacgcgtccgctcgtgaaaaagttcctgcaaaataaggaaacgcacacgaacgccgaccgcgtggtggggcagaccgccgttgtgacagaggatatcgataaccttgcggcacatggacgcgtggaagtgctcggcaacgactgggcagcacgcagcacagaaaatgtccgtattcaaaaaggcacaaaggtgcaggtggtgcgcattgagggcgtaaagcttatcgtgacaccggttgtatcttaaattgaaactggaggtaaaaacatggattttgaactgtacatcaactggggcgttgtgggcattatcgttctcatcgctcttgtcatcgcactgcttgcggcgaacattaaggtggtgccgcaggcgcacgcattcgtcattgaaagactcggcgcgtaccacgccacgtggagcacgggcctgcatttgaaaattccgtttatcgaccgcattgcgaagaaggtctcgctgaaagagcaggtcatcgatttcccgccgcagcccgttatcacgaaggataacgtcacgatgcagatcgacacggtggtgtatttccagatcacggactcgaagctgtatgcttacggcgtggagcgcccgatctccgcgattgagaacctttccgcaacgacgctgagaaacatcatcggtgagatggagcttgaccacacgctgacctcgcgcgatgttatcaactcgaaaattcgcgtcattctggatgaagcgaccgatgcgtggggcattaaggttaaccgcgtggagctgaaaaacatcattccgccgaaggaaattcaggattcgatggagaagcagatgaaggcggagcgcgagcgccgtgcgaagattttggacgcagagggcgaaaaacgcagcgccatcctcattgcggaaggccagaaggaatctgccgttctgcgcgcggaggctgtgcgtgagacgaaaatcagagaagcacagggtgaagcggaggcaatcctctccgtgcaacgtgcgttggcggattccattaagcttctcaacgaagccgatccgaataaagctgtgctgaccttgaagagctttgaagcgcttgagaaagtagcggacggcaaggcgacgaagattatcattccgtccgagattcagggtatggcaggcttagccgcaagcgcgaaggagatttttgcgacggaaacgccgaaggagtaaaatagagtttacggcgagcaagacgtaaaagtctttcgtcaagttttctccggaaaacttgcgggttcttagggcagcgccttgagtcgccattcgcaaatggcgaaatacttttgccgctaatacaatttatcctctcccggcgcagccgggagaggatttttttattgagcttgcgttttatgcgttttcaaggtgatttgagcgacttgtgtatataaaagctctctatatatctccctcagtcagagggaacttggaaagctgccttttttgacgaatagagggagatgatgtacgtaggtaaagtgaaaatgcccttttgcatttcaaggtgtgttgttatgtatttgatatatggtgagacggaagcggagaaaggggacatatcgaggtatacaacgcatgtccacgagcaggggagaattttggatttttttctaaaaacggcaaaaactattgaaaaaacgcgttaaatcccgtaaaatgataaaggcaacaatgtataaagtacgcctacggcttggcacgcaatttgcttgcattttccgccatgccgaccgtaaccccccttgccgggcgtcagcctgcctgcgggtgttccgtgcagcctgacgaaaaatctgacggcgcagcttgtgcaccaacgttatacattgctgccttaaaggtctgcttaacggattgatttatcagtcgcttgagacagactaaggacagaaaattcaaggctgcaagtgccggaggtgcgatatggctgaactgatgtgcatttttactgtatctgcatgggcgttttgcggtcaattttagaagcataggttgtgttttttgagcacagcctattttctttttttcgcggtgctttcttttacgccgcaaaacttgaaaggatcggtgattttcaatgagcaaaaaagttgcagtgattatgggcagcgacagtgattttccggtggtttccccggcgattcgcagattgaagcagttcggcatcccggtggaggcgcgcgtgatgagcgcacaccgcacgccggaggccgcggcggaattctctaagaacgcggaaaagaacggctttggcgttatcattgcggcggcgggcaaggctgcgcatcttgcgggcgtgctggctgcgcacacgacgctgccggtcatcggtattccggtgaagtcttccacgctcgacggccttgacgcactgcttgcaaccgtgcagatgccctccggcattccggtggcgacggtggcgattgacggcgcggacaatgctgcgattttggcggcgcagatgctggcgctttccgacgagagcatcgcaaagcagctgcaccagatgaaggtggatatggagcagggtgttgcgaaaaagaacgaagccttgcagcagaaagttgccgagctataattcgggagggataaacgatgacaaaatcgattttgagaaagtacgcaaagctcatcgttaagatgggcgtgaacatcaaaaagggtcagggcgctgtaatcttggcggatacggcgcagtctgagatcgcactgatggtggcggaggaagcctaccgcgccggtgcgaagtgggtggacatccgctggacgaaccaggaccttgacaagatgcgctataagaaagaaagcgtaaaggtgctttccgctacgcaggagtgggaaaaggcgcgtatgcagtatgagcttgacgagctgccggtgcgcatttggattgactctgacgacccggacggcctgaagggcgtgaacgttgagaaaatgcagaaggcgaaccttgcccgtatgaaggtgagaaagccgtaccgcgacgcgatggaaaacaagtaccagtggacgattgtcgccgtgccgagcgcaaagtgggcgaagaaggtgttcccgaacgaccgcacgagcatggcggtgaagaagctgtgggacgcaatccttcagacggtgcgtgtttctaaggataacgacccggttgaagcgtggaaagcacacaacgcttccctcaaagcacgctatgagaagctgaacgcatgtcactttgagagcttgcactattttagcgagaacggcaccgatttcacctgcggcctgatcccggacgcacagtggatgggcggcggtgaaacgctgctggacggtacattcttcaacccgaatatgccgaccgaagagattttcacctccccgatgaagggcaaggcagagggcacggtcgtttctacgatgccgctgtcttaccagggcaatttgattgaaaacttctccattacgtttaagggcggccgcgcggtctcctgcaaggcggaaaagaaccaggagcttttggagcacatgattgcgatggacgagggcgcggcgcagatcggcgagctggcgcttatcccgaacgactctcccatctcgaacctcggcattctgttctacaacacgctgtttgacgagaacgcttcttgccacattgcgcttggcttgggcttcccgaatgtcatcaaggattacgacaagtatacgcttgatgagattcacgacaagggcgtgaacgattccgtcatccatgtggacttcatggtgggcgacgcgacgatgaacattgacggcatcacgccggacggcgaggttatcccggtgttcagaaacggcaactggacagagaaattcatgtaattcattttatagataatttaaagaaagagagaagttaaagaatgaaaagttacagcgatagctacaaggcagcgggcgttgacgttaccgcaggctacaagtccgtagagctgatgaaagagcacgtaaagcgtacaagcattccgggcgtggtttccggcatcggcggtttcggcggtcttttccagccggatatgaccggtatgaaagaacctgtgcttgtttccggcacagacggcgtgggcacgaagctcgtggcggccatgctgctcgataagcatgacaccatcggcattgactgcgttgccatgtgcgtgaacgacgtcgtatgctgcggcgcaaaaccgctctttttcctcgattacatcgcctgcggcaagaacgtgccggagaagattgcagagatcgtaaagggtgttgcggagggctgcgtacagtccggctgcgcgctcatcggcggcgagaccgcagagcacccgggcgtgatgccggaggacgactatgacctcgcgggctttacggtgggcattgtagataaggataagatcattgacggctccaagatgcaggcgggtgacgtgcttgttggcgtggcatcctccggcgtacattcgaacggcttctctctggtgagaaaggtgttcggtctgaataaagaaaagcttgaaacgtattacgaagagctcggctgcacgttgggcgaggcacttctgaccccgacgcgcctgtatgtaaagcctgcgctggcggccattgaagcggcagacgtgaaggcaatctcccacattacgggaggcggcttctacgagaacattccgcgtatgatgagaaagggcctcaccgctaaggtggaccgttccgcagtgccggtgctgccgatcttcgacctcatcgcgaagacgggcaacattccggagcgcgatatgttcaacacgttcaacatgggtgtcggcatgtgcatggcggtctccaaggagacggcggacgcggccattaaggcgctgaatgatgcgggcgaaaaggcgtttgtcatcggtgaagtggttgagggcgacgagggggtcatcctgtgctgaacatcgcagtcctcgtttccggcggcggaacgaatttgcaggcgctgatcgacgcggaaaaagccggtaaaatcgaaaacggcaaaatttccgtgattgtggcgagcaagccgggcgtttatgccttggagcgtgcgaaaaacgcgggcattgagggcattgtgttggcgcgcagcgactatgaaaacgtggacgcgtacagcgaagcgctcgaaaacttgctgaaagaaaagcacacggacttaattgttctggcgggctttatgaccattacgaacgagaagttcacgaaggcgtttgaaaataagatcatcaacgtgcacccggcgctcattccgtcgttctgcggcaagggctattacggtctgcacgtgcacgaggcggctttggcacgcggcgtgaaggtctccggcgcgacagtacactttgtaaacgaggtgtgcgacggcggcccgatcatcttacagaaagcggtgccggtggagcagggcgacacgcccgagacgctgcagcgccgcattatggagcaggcggagtggaagattctgccgcaggcagtgtctttgttctgcgcgggtaagctttccgtgaacggctctatcgttacgattaaagaataatttatccctttacatagaaaggaaacggatacatggaaattctggatattaaaaaggaacttgcaggcaacgcatacccgggccgcggcatcgtcatcggcaaaagcgcggacggcgtgcatgcggtcatcgcgtatttcattatgggccgcagcgtgaactcccgcaaccgcgtatttgtggagcagggcgacggcatccgcacggaagcgtttgaccccgcaaagctttctgacccgtcccttgtcatttatgcgccggtgcgcgttttggcaaacaagaccattgtgacgaacggagaccagacggataccgtgtttacatacctcaaggcgggcaagagcttcaaaaaagcgttgaagacccgcaagtttgagccggacgccccgaactttacgccgagaatttccggccttgtaaagctgaaggacggcgactttacctataagctttccattttgaagagctgcgagggcaacccggacgcgccgcagagctttttcttcgactatacgccggtggacggcctcggccacttcatccacacgtataagtgtgacggcgcaccgcgtatcccgtcctttgagggcgagccgaagccggtgaagattgagggcgacatcgacacgtttacgaatgacctgtggacgaacctgaacgaagacaacaaggtctccttgttcacgcgcttcatcaatttgaagacgggcaagattgagacccgcatcgtcaacaaaaataagtgatttttcggaggggaacggaaactatgaaagaactggaactgaaatacggctgcaacccgaaccagaagccggcgaaaatttttacgaacgacggtcgcgacctgccgattcgcgttttgaacggcagaccgggctatatcaatcttttggatgcgttcaactcctggcagctcgtaaaagagctgaaagcggcaaccggcatgccggcggcagcttcctttaagcacgtgagcccggcgggcgcagctgtggcaaagccgatgagcgacacgctgaaaaagatttattttgtggacgatctggagctttctcccatcgcgacggcatatgcaagagcccgcggcgcagacagaatgtcctcctacggcgactgggcagcgctttccgacgtatgcgataaggaaaccgcaacgctgttggcacgtgaagtttccgacggcatcattgcgccgggctacacggacgaagcgctcgcaattttaaagacaaagcgtaagggcacgtacaatgtcgtcgagattgacccggattacaagccggagccgattgagcacaaggatgttttcggcatcacgtttgagcagggcagaaacgaactgaaaatcgacgcggacatgctgacaaatcttgtgacggaaaacaaagagattccggaggacgcaaagcttgacttagtgctctccctcatcacgctgaaatacacgcagtcgaactccgtctgctatgcgaaggacggtcaggccatcggcatcggcgccggccagcagagccgcatccactgcacgcgtcttgcgggcaacaaggcggacatctggtatctgcgtcagcatgaaaaggtgctgaatctgccgtttaaggagggcatccgccgtcctgaccgcgacaacaccattgacgtgtacatcagtgaggagcatgacgacgtgctgcgcgacggtgtttggcagcagtttttcacggagaagccggaggtgttcacccgcgaggagaaagcggcttggcttgcgacgtttaagggcgtttccgtgggcagcgacgcgttcttcccgttcggcgacaacattgagcgcgcacacaagagcggcgtagaattcattgcgcagccgggcggctctatccgcgacgacaacgtcatcgatacgtgcaacaagtatggcatcgccatggcattcacgggcatccgtctgttccaccattgatccgaaaggcgaggtgcttttgttatgaatattctggttatcggcagcggcggacgtgagcatgcgatcatccgcaagctgaaagagagccctaaaacggaaaagctgtggtgtgcaccgggcaacggcggcattgcggcagacgccgagtgcgtggccattaacgcgatggacattgacggcgttgtgaatttcgcgaagaaaaacgcagttgaccttgtgtttgttgcgccggatgacccgcttgcggccggtatggtagatgcgctcgaaaaagagggcatccgtgcattcggcccgcgcgcgaacgcggccatcatcgagagcagcaaggtgttttcgaaaaatctgatgaagaaatacggtattccgacggcggattacgcggtgttctccgacccgaaagaggtcgtagagtacgtggaaaagcgcggcaagttcccggttgtcattaaggcagacggcttggcgcttggcaagggcgttatcatcgcgcaaaactttgacgaggcgaaggatgccgtgcacaccattatggaagacaaggtgttcggcgcttccggcaacaacgttgttgtggaggaattcctgaccggcccggaggtttccgtgttggcatttacggacggcaagacgctgcgcccgatggtgtcctctaaagaccacaagcgtgcactggacggcgacaagggcctgaacaccggcggcatgggtaccatcagcccgaacccgtattacacgaacgaaattgcggacgagtgtatgaaaaccatcttcctgccgaccgtcaaagcgatgcagacagagggcagaccgtttaagggctgtttgtatttcggtctgatgctgaccccggacggcacgaaggtcattgagtacaacgcgcgcttcggcgacccggagacgcaggtcgtgctgccgcgcctcaagaccgattttgtggatgtcatcaacgcggtcatcgacgagaagctcgacgagcttgagattgaatggatcccggaagcgtgcgcgtgcgtcgtgatggcgagcggcggctacccgcagtcttacccgaaggggctggaaatcaccggccttgacaaaaacggtcaggcggagggcgtaacggtgtaccatgccggcacaaagcttgaaaacggcaagctgctgacgaacggcggccgcgtgcttggcgtgaccgcgacggctaaaacgctggacgaagcgctcgaaaaggcgtatgcagcggtggagaaaatccattttgacggcgcgcattaccgccatgacatcggtagaacgaaataagataaaatgagaaagcagccctgttccgacgtgtgaagtgaccccaaaaagttagacaatattctgaagtaaaaattgttcaagcagccgaaagggcttgccgtctgtgaattgcaggcggcaagccctttagcttt

SEQ ID NO: 1686 - DNA, 23451 bp, Unknown
  gut microbiota DNA sequence
gttcgattctggaggggttgtcaaaaatcaaattttggagtagaattttatctcatacagtgaaagagctttttcgtagctttttatataagaagagccgaaaacccttgaaaacaaaggctttcggcgttgttcactggcgtccataagaggatttgaacctccgaccccacgcttaggaggcgtgtgctctatccagctgagctatatggacgtgtctgatatatgattatagcccgatcaaagtcgaactgcaatcccttatttagttttttttgaggtggccgttgtaacgcaaccttaggaggcggaccctctatcctgctgaggtacaagcgcatatttaatttatgaggctactacccatccatcggggaacacttttaggttctcttaggagcgtgacctctatccaaccgagctactgagacatgataaattggggtcataaagtgtactgtgttattgtaccgcacggcggcgcatttgtcaatcatattggattttcgcgcactgaaatatacacagaaaaagctttgaaaccccgtgcaaattttcctcaaaagacaaggctctgggcggcttttgccttgacgcttttcgctttttcgtctatactgatatatgtataaaaacttatggaaaccaaacaccgcgggcatcgggaaatgtgcctgcacggaaaaaaacaaaggattaaggagcccgatacatggtttttgccgatttgttctttatctatgtctttttgccgctgtgcctcatctgttacggcctcgccaaaaagctcagcaccaaaaacatcgtgctgattgtcttttcactcatcttttacgcttggggcgagccgctttggattttgcttttgctgttcagttcattctttaactggttcatcggcatattgatcggcaaatttcgggataccccgcgcgcaaagttagccgttggcggcggtattttggtagatattctgcttttgctcatctttaagtacagcgcgttcattgtggaaaacctgaacgccgtttcgggcgcggccattcccgtgccgcagatcacgttgcccatcggtatcagcttctacacgttccaggctatctcctacattttggactgctactgggaaacggtggatgtgcagccgaaataccacaaattccttttgtacctgtccctctttccgcagctcatcgccggcccgatcgtgcggtacagcgttgtggagcaggagatcgacaatcgctccgtcaacgcgaccgacctatgcgaaggtgcgctgcgcgtaatcctcggccttgcgaaaaaggttatcatcgcgaacaatttgtggtccatcgtcaacacgttcttcggcaaggacatcacgggactttccgtgctcggcacatggtacaccatcatcgtgtattcgctgtatgtttactttgacttcagcggttattccgatattgccatcggcctcggccgcatgtttggcttccactttgacgaaaacttccgtcatccgtttgcctgcaccaccattgcggagttctggcagcgctggcacatctccctcggctccttcttccgcgactaccttttgtacgtgccgctcttcggcaagccgcgcaagtatttcggtctgttccttgtttggttctgcactggtctttggcacggtgccgcatggaacttcattttatggggcctttactacggctgcttcatgctgttcgagcagaaaatgggcaaaaagcgcatgaaaaagtggccgatcgtgtggaagcacgtgtatacgaagcttgtcatcatcctcggcttcggcattttctattttgaagatctcggccagcttggtcagtttttcctcaatatcacgggcatcagcatgattgcgaacagcgcgccgtttacggaccccatgacgttctcctccctgcgcaacaacatctttctcattttgttcgcgattctcgtcagcctgccggtattgccgaagatcaagagttattttctcgagagcaaaaacgataccgtttatgccatcggccgcgtcggctccgttgcggtctgtatggtgttgctcgccgtcgtgagtgtcctgctcgttgataccacgaacaacgtgttcttgtatttcagattctaaggggaggtgctcattgacatgaacgattttaaagaccttgaccttgattattttgctccccgcaagcccgccgaaccggaagcgaagccggagaaaaccgaagccgtagatgcgccgactgcggatgaaagcgccgaacccgcagagcgtcgccgcaagccgaagccgaaccgccgcgagcttttgaacatgcggctttccgttttatccgtcggcgttacggtcattcttttcgccctgatgacgctgtatctgctccttttcccgcgctccaccgtctcgcagattgaaaaccgaaatcttgcggaattcccgaaattctcttttgcatcgtatttttccggctcgtttacggcggacgtcgccacatggtttgacgataccgtgccgaaccacgacggctttaagaacatgagcaactccattaagaatctgtttggtatgaagatgttcgcttcaagggtcagcaccgcaaagcccgagacggacagcacagataacaccgatacttctgccgcaaacggtgacacccagacgaccacacccgcaaacggcaccgtgccaaacaacacgaacctgctgcaatacgccgcagggcgtgtgttcccggccgtgagcgctgcggatgaaaaaatgggccgcgatttcagcaccgaggataacagcacactggaatgggtgaacaacctgcttgttgtaaactgggataatcactggcgctgcatggaggccttcggcggcggtggcggcaccgcttacgccaatgcactcaacgacctgcaaagcaagatcggcagcggtgtgaccatttggtctatgcccgcgcccaccgcttccgccatctacaccccgaaaaacggcattgattatgttggcaaccagaaggaatgctttgacggcgttgccgaaaagctgaatgccggcattcggtccgtaaacgttgtggatgtgatgaaaaagcatgcggaagaagatatttacctgcgcaccgaccaccactggcaggcacgcggcgcctactatgccgcccgcacgtttgccgaggccgcaggtgtgccgttcgcagacctttccacctacacggaagaatccattccgggctatgtaggcactatgtacggtttctcgcaggatacgcgtattttgaacgacccggacgatttccactacttcgtgccggcctcgaactacgtggcttcctactacgatacttcttttaactaccagtacgaagacgacctctttgccgatgtgaacaccgcaaacgcgtacctcaagttcctcggcggcgactcctgcatcgtaaaagtcgatacgcagatgaagaacggccgcaagctgctcgtcattaaggacagcttcggtaacgcggagattccgttctatacgaattcctttgagcagatctacgttgccgacgtgcgctatttggagtgcaacctcgtcagcttcatcaaagatatgggcattacggatgtgctctttacaatgtccgcatactccgttgtgggcgataacgccgacaacattcagaacctcatcgcgcagaacgccggtgaaaccatcaccgattcgcacattgtcccgtctgttacgccgaaaacggtcatgccgaccgcgacaagtgcaccaacgacgacttccggcacggatacggccgctaacaccacctcgaccggtacagatgatacctcttccgcaaaagaataacaaaggagagcctatgaaagaactggaatatccctttgacgccgcttacatcatcaaaaagcgcaaatctttaaagaaagcactgctcgcagacggcacctcgcgcatcagaaagaagattgccgtgttcggaggctccaccacaagcgacattgtaaaaacgctggagcttttcctcttagacgccggtattgagccggaattttacgaatccgaatacgcgcagtattttcaggacgccatgttcccggatgaaacgcttttaagctttaagccggacattgtgttcatccacaccacgaatcgcaacgtgacgaactggcccgagatgaccgacaccacggagcaaatagacgaaaagctgcacacggaaataaaccgtttcacggcgatgtggaaaagcattgcggaaaagttccactgccccatcattcaaaataattttgaaatgccgctttaccgcctgctcggcagccgcgacgcgtgggacatccacggccgcacgaatttcctcacgcgcttaaacgaagctttttacgcctacgcacgcgaaaatgagagcttttatattcacgacctcaactttgtttctgccgattacggcctgaaagaatggtcgaacccgctgttctggaacatgtacaaatacgccatgtgctttgaggcgatcccgtcctttgcgttcagtgtttcgcacattatcaagtcgattttcggcaagaataaaaaggcgcttgcccttgacctcgataacaccctgtggggcggcgttgtgggcgacgacggcgtagacggcatcgagatcggccaggagaccggcgtttcgcaatcctactacgagtttcagacctacgtaaagcagcttaaaagtctcggcatcgtgttgacggtctgctctaaaaatgaccatgaaaacgccattgcggggttaaaccaccccgaaggtgcactgcgcccggacgatttcgtcatcattaaggcaaactgggaaaacaaagaccgcaacattgccgagaccgccgcagagctgaacattctgccggattccatcgtttttgcggacgataaccccgccgagcgcgagatcgtgcgcacgcagatcaagggcgcggccgtgccggacatggacggcgtggaaaactacatcacgacgattgaccgcagcggcttctttgaagtgacaaccttcagcgaagatgacttgaagcgcaacgaaatgtacaagaaaaacgccctgcgcgccgcggaaatgacgtcgttcggcgattataacgactatttaaagagccttgagatgcacgccgtcatcgatgatttcatcccggtgtaccttgcgcgcatcacacagctcacaaacaagagcaaccagttcaacgtgaccacccgccgctatacgcccgccgaaatggaaagcgtatttgaggatgacagctatatccgtctgtacggcaagctcatcgataaattcggcgacaacggcgtcgtttccgtcgtcatcggcagaaaaaacggcacggcactcgacattgacctatggctgatgagctgccgcgtgttaaagcgcgatatggaatttgccatgttagaccgccttgtggagcgctgccgcgaagtgggcgtagagacgattaacggctactactaccccaccgcaaaaaacaagatggtcagcgatcttttcggtcgcttcggcttcacgaagactgaggagcacgaggacggcagcaccgtgtggcagttgcgcgtcgcggactacaagccgcagaaccacgtgatcgaagtgttcggcaacaaccacgcagaagcgtgatcctcgctaaattgagtattaaatcaaattacagaaaggaattttaccatggacacaagagaaatttttgaaagactggaccgcgtatttcaggatgtttttgatgatgacacccttcacgtcacgccgaaaacgaccgcagacgacatcgaggattgggacagtctggagcacatcacgctgatctccgctgtagagcgcgagttccgcataaagttcaagatgggcgaaatctcctccatgaagaacgtcggcgaaatggcttccatcatcgcagcacgcgcaaagggctgatcttaccgcaaaagaaaatgccgcagacaaccgggttttcccgtgcctgcggcatttttatatttacggttatttataacggttcatgaagtcgaggtaatcgtcttccggcgtgcgcttcggttcttccttacgcggagcggtgtacgggtcagccgtttcctgctcggcggcacggcggcgctgttccgcacgtctgcggcgcgcttcgcggcgctttttgcgcacgcgctgcccgtggatgtacacgataagcagcaacaccgcaaagacaatgacaagcaccaaaacaaatttcaaaatgccgaaaatcaccgagccgcccttagagccgctcgcttcggaggatgcactgctttcggccgcggaagattccgtaccgccggcggtggactctgcgttgcttgcagtgcccacagccgccgagtctgtggggttgccggatttatacgtttccgctgccgctgccacggcgttaaagagctttaaaacaccggcatcatatgcgccggtctgaaaatccgcttccagattatcgtgcagcaaagcgctcagctctgtgccggagaacgcgccgtgcaggccatcaccggccaccgccatatagtcgccgtccgaaacggaaaggcctatgataagcccgtttttgctgtcgccgccaagcttccacgtgtccatgacctttttaaggtaggccacgcgaccatcataatcggatttttcgccgggcaaagtgttcatggtgaacaccgcaatctgcacaccatacgtcgcattgaggtcagcgtttttatcgttgattaccgttttcgtactggcggaaatcacactcgcttcgtcatagacataaagatccgcgggctgctccggcacttcggcgtccgctgccgtcgcgcttacggtgctgcccgtgtcgcctccgtcttcggaagacgaggtgctcgtgtcgccgtttccggcttcatccgcaaacgcatacaggttgccggtggaaaacaccatcaaaaccacaaggcatatcgccgcaaagcgtcccatacccgctttatatagatttttcatccaatccctgcctttcggcagcccggctgtgcccggccgcgtaaaataataccgcacaaaacctgtttcgtagttttatgcggtatcggttctgttgtacctattttaagagaatttttcgctgctgtcaagtaaagccaagactttgcatcttacgatcctcttaaggttatttcagctctacaatcgtcacgccgctttcgccctcaccatatacgccgaggcgaaaggatttcacggccttgtggcggcgcaaatgctgctgaatgccgtttctcagtatacctgtacctttgccgtggataatcgtcagcatgttgagattgtgcatcaaagcgtggtcgataaacgcatccacttccatgagcgcttcttccaaattcatgccgcgcacatccacttcattgcgcgccggagcggaatccatcttcttcgtcacggtgcggtgaccgcctgcggctttcttcttttccttcggcttctggtcggtcaggcgcaggtttttcagcggcacgcgcgttttgatgatgcctgcctgcaccaaaatctggtcgccatttttcggcacatccaaaacggtcgcaatcttatcgatgtcgtaaatcagcaccgtatcgccgacctgtaaggggcgcggcaacacataatcttcgtctatgcggcgctcgtgcaccgggtcgctggccttttccatatcgcggatgcctgccttcaggcgcgctttctgctctgcggtcaatagtttctgcttgttgcggcgcaggtcttcaagctcgtctaacaggctctgggcttcgcggcgcgttttctgtacgagctccgccgcttccattctggcgcgctcaatttcgtgcttcgcgtccttttcggcgcggtcgcgcagcgcttcagcctctttttccatgttctgcgctttcaaacgcagctgctcggcactttcacgctcatcttccattttgcggcggctctcctccaagcgggagacgacctcctcaaacatagtgctttcatcggaaacgagctcctttgcgtgctctacgatgttcgccggcataccgagacgtgcggaaatggcaaatgcgttggaacgacccggtacgccgatgagcaggcgatatgtcgggcgcagcgtcgccacgtcaaattcgcagcaggcgttttcaacgccaacggtctgaatggcatatgccttcagctctgcgtaatgcgttgtcgccatcacgcgcgtgcctttggtgcgcatggcttcgatgatggaaatagcaagcgcggcgccctcgaccgggtcggtgcccgcaccgagctcatcgattaggataagactcttgtcgtccgcaatgttgagaatgcggatgatattcgtcatgtgcgccgagaacgtggagagagactgctcaatgctctgctcatcgccgatgtccgccaaaacgtggtcgaaaatcgaaacttcgctgccatccgccgcggggatcatcaggccgcacatggtcatcagcgtcaaaaggcccgctgttttcagcgagacggtcttgccgccggtgttcggaccggtgacgatgagcgcatcaaaatcactgccgaggtacagatcggtcggcacgaccttatttttatcgatgagcgggtggcgcgccgatttgatggcgatgcgcccctcctgattgagcttcggcacggtcgccttcattttgtaggcgagctgcccttttgcgaaaatgagattcagctccaccgccgcgcggtagctctggatgatgccgtccgcaaactcgccgatctcacgggaaagctccgtcaagatgcggtcgatctcgtctttttcgtccgagcgcaacacgcggatttcgttgtttgcctccacaacgccgatcggctcaataaacacggtggcaccgctgccggaggaatcgtgaatgaggcccttgacttcattgcggaactccgccttaaccggcacaacgtagcggccgccgcgttgggtaacaatggcctcctgcaaatacttttggtaggtctgcgagcggatcattttatcaagctgctcgcgcacgcgcagcgatgccgcgcggatcttgcggcggatagccgccaaggcgacgcttgcggtatcggcaacttcctcctcgctgacgacggtcatcgagatgcggtcttcgataaacttattcggctgcaaggtctcgaagcggtaatcgagcgccgttttgacgctttcgctttttttacgccaatccgaaacactgcggatggcacgcaatgtcgcggcaacagacaataattccgccagattcagcacgccgcccgcttctgcgcgacgcagcgcattcgtgacattcgtcatgccgtaaaacgacggtgcgccgtactttgccattaaaacaaacgcgtcgtccgtttcctgcaaaaggcgctccacgtggcggatgtcggtatccggctcaattttctgcgccagctccgccgcatccgggcaagtggtttcatttgcaagctgaagcagaattttatccagctccagcgctttatgatctttcagcattttgttcctgctttcttttcgcacccggttttaccgggtcaatctcctctgttaatccaaaaacgttttataaaactccaaggtcttcggtacggtatgtaatgtatggacaacgtagctttccgttgcggcgttcagaattttcagcgcatcctccggcagcgagaagttatagagcttctcaaaatccacatacgcaatgtgtcgcatggcggtcagcacgcccggcggcagcgcgacatacggttcattcgcgccgtgaaagcacttgtcgcacagaataatgcccctttgcggcagaaagaacatcgtttccgcctcatacgcggcgcagttttcgcacgcaactaaatttggcatatagccagccgacgagagcatacgcagctctgtcacggactgcaacagccgtatcggccgcgtgccctttgataaaaaatgcagggaatttaagatgagccgcaggtattcctcggaatccgtatcctccggcaccattaagtacgccagctcacagaaatactgcgccagcgaaagcgcggcgatgtcccgccgaagcccgaaaaaaacctcgatcggctcggcatcgtcaatcatgtatttttcccgccccttaaaaatagaaaggcgggaatagcacaaaagctgcgttgcggcacttttgctgtcctttaagtttttggcgcggcgggcaaacgcacgcaccacgcccgcgtcacgcgtcagcaccgtgacaaggcggtcgctctcgcccaccgtctgctcccgaatgatgagtccctgggtctttacctgcatcaaagtctcctgccgtaaaatccacgtcggcaagctcccggcgtgtaagctgcacgtagcggatgtaatcctccgccttgccgcttttataaaagctgttccacgcggcatgcgccgcattctgcatcggggaatttcgcatacaaacgcctcctaaaccgtatggctgtttttagcttctgcggtttttgcgggttttatccgtggaaacgtctgtcaatttctcaaaatgtgaccgttttcccgaaaatcacggtttattgatactggtcaaaatcgtgctcattaaagccgagctttgtgaggatctgcgggcgctggcgccagtcctccttcacctttacccaaaggcgcaggttgatcttgcagccgaaaaagcgctccatgtcttctcttgccttcgagccgatttttttcagcattgcgccgcccttgccgatgatgatgcccttgtgcgtggcgcgttcgcaatagattgtcgcatcgatctccgtcaggttgccgaggtcgcgcatgctttccgtcacgactgcgacgccgtgcgggatttctttatccgtaaaacgcagaattttttcacgcacgatctcggacgcaatgacgcgctccggctggtctgtgagcgtatcttccgagaagaagtgtccacccggctccgccagtgcgatgagctcctcacgcagcgcgtccatgccgttgccgtcctgcgcggagaccggcaccacagcttcaaagtcgtagagcgcggagagcttcgcaatctgctccatcaaaacgcttttgtcctgcaaaaggtcaatcttattgatggcgagcagcgccggcacacctaaatctttaaagcggtgcacaagctcttcatctgctttggagattttcgtgtttgcctccacaacaagcaggcaggcgtccacatctgcgacggacgaggtaacgcttttcaccatataatcgccgagggagttcttcggcttgatgaggcccggcgtatcgatgaacaccagctgcgtttcgccctctgtccacacgcccataatgcgcgtgcgggtggtctgtggcttattggaaacgatggcaagcttcgtaccgagcaggcggttcaaaatggaggatttgcccacgttcggtctgcccacaatggcgataaacgccgatttttcgttcatgtagttttctgtatccatagttttcccggggcacgcagccgcggtttcctttctgataatttatatcactttttatgaagcttttcccgcacgccgcatggcactttgaaaatgaagaaaaaggccaaaatgagcgacagaatgaaaagcacaaggtaaagcggatttgtgacgattgttatcaaaagcgctaagatcgcttccggacgccacaaaacggctataccgacaaaagcggcaaaaacggcgcacacaagcaccgctcccgccgcgatatctttcgtttttccgatgagcggattatagcttttctgcgcgtaatcacacagcatctcaatggcggtgttgaacgcttccgccgcgataaccattgcgatggtcaaaagcagaacgccgtattcgctgcgcgttacacccagaaagggcgaaaaaaacaaaacgtataccgccgctgtaaggtgtatacgcatgtttcgctccgttttcacagtatggaaaaatccgcgcgcggcatcgcgaaagctgtccgcctgcgtgcgggtcttaccgtttgttttccaatccggcaccatgttaaacggtgtagctggaagtgcccggcaaaccgagctgcgacataacgtattcttctttttcacgcatgcgcacacgctccatgccgccgttttcgtggtcatagccgagcaggtgcagcatagaatgcgccgtcaggtagccgatctcgcgctctaagctgtggccgtagcgctttgcctgtgccattgccatttccacagagagcacaatgtcgccgagaatcttcgcgccggtatcgtggttgatgtcatacacgccgttctcacccatggggaaagagagcacgtctgttgcggcatctttgttgcggtactgcgcgtttagctcgcggatctgctcgttgtccacgaatgtcacgctgatttcagcggaatcctcaaacttctccatccgcagaaccgcgtggcaacagcgacggatgagcatgcgcacgccggtcggcactttgaccgctttctggttgtttgtgatgatgactctgattttttccatatgctaaaatcctttcgataggggttattttgctgcggacgctttttcatacgcccgaatgatatcctgcaccaagcgatggcgcacaacgtctttttcggtaaagcggaaaacggaaatgtcatccacattgcgcagcacacgcatcgcgtccttcaggccagagcgtctgccgtccggcagatcaatctgcgtgatgtcgcctgtgatgaccattttggagttgaagccgagacgcgtcaggaacattttcatctgctcgcaggtggtgttctgcgcctcatccagaatgataaagctgtcgtcgagcgttctgccgcgcatgtacgcaagcggcgccacctcaatgctgccgcgctccacaaggcgggcgtacgattccgcgccgagcatgtcgaacagcgcatcgtaaagcgggcgcaggtaggggtctaccttctgttgcaaatcaccgggcagaaaacccagcttctcgccggcttccacggcagggcgcgtcaagatgatgcggttcacctgctgcgcacggaacgccgtcacagccatggcgaccgcaaggtacgttttaccggtgcccgcagggccgacgccgatggtgatggtgttattgcgaatattgtcgcaataactcttctgtcccaccgttttgggctttacgggcttgcctttcgccgtgatgcagatgcagccgtccgtaagcggcgccatctgtgcttcgctgtcctccatgaccatgtcgatgcagtagccgacgttctggtcgtttaggacttcgcccttttcgacgagccgcaaaaggctttctgccgcacgcaccgcacgcgaaacaccgggttcttcgccgatgacgtgaatctgcgaatcgcggcaggaaaacgttacaccgaatgccttttccagtcgctttgcgttcacgtcaaagctgccgaaaagctctgccgcgtattctgctttgtctacatgaatgcttctttccaaatcgttctccttttgccgcacggctttgaaaaaccgtgcagtctaaaaaaccgaatttcctgttttattatagcataagtgttcccaatgtggttatgaaattttcaacgaaatttagccgtttccctgtacatttccgacaaatacccctataatccccggattttcaggctcttcaggcagggtgagcggcgcctcctgcgcaatgttttcaagacatacgcaccgggacgtgacgtaaaccgcgccgtcttttgtctgatatgtgatgttttccgtaagcacacgaccgtcttctccaagcgcaagcttttgcagctgatgcagattttcaagcgcgcggcgctgcgcttcttcctccgtgaacgtaacgggcacggtctcctcctcatatacgcgcaccgtttccgcccacagcggtaacgtgtgcccctgcaaaacgaacggcgtgcgggtgtatgccgtctggcctttcggcgcgccggaaagcgagagcggcacgcgcacgcccaaaatatacagcgcgcgctgtgtaccgaggtccgtttcgcgcaccgtttcggtactaagcggacaggatgctgtgaatgtgcgctgtgtctccgccagaatctccgcacgggcgcgggtgtaaaagcagcgcacggggttgtattccgggtcatacgggtcgcccacctgtgtgatgccggaaacgagcacctgccccgcggcgcaggcagaaccgactttcacgagcaccgtaccgttttgcgccgtgatagaatggatgagccccgcgcgtgacgcgacgatgtcccccgtgccgtcgtgctccgcgccctccgcctttgtgacggacgtgcgcagctcaagctgtacggtgcaaccctccgtgttgaacgatgcccacgaaagctccggcaactcctccaaaagcgcgacagaggccaaagcggtatcggtgcttcgcggcgcgccgatatacacgccaacgcgcttggctgccgccaaaatttcgctttcggcatacggaatatcttcaccggagatcgtcatctcccagtaaaagccggaaaggaacagcatcagcgccacgccgagcgccgtgccaagcaaaagtcccggtcggcgcagcatgcggcggaaccgaaacgggaagccgcttttctccgcaagcttcacccgcgcgtgcgtgcgttgtttgatcttatgcagctttttgtagtccttcgcatacaaggtgaaaagcacgtctttcccatccttttgaagtcgaatggggcgcagacccgttttcaccgcaatgttcataaaccgtgccgtatcgcccgaaacacgcgccgttgccgtgccgagcacccaatgcgtgattttcttcatgcgaacctcaccgcctcaatatgtcccgtgatcaccgcgccgtcctcttcaagacacaaaagccgtaagcttttcccctccacccacacggcgcgccgcccgcagcgcaggccgatcttttccgtttcgtattcgattacgccgtcacaaccctctaaaataagcttcgccgtgccgagaatctccgtgcggatcgtgccgtcctgcatggcatagcgcagcttatctgcaagctcacccatgcgcccaccctctttctttttactcttctatacgtatgtgcggaaaaacacgcatatactttttcaaaaggagggttcaccgtgccgaagcatacagaacacatcgcttttttcattcgccaaaaattgcagcttccggcgctttatgtccgcgccgccgcgcttttactgctcgccttgctcctgctcaggcaccgcaccgctgccgccgcaggcgttgtcagcggcatccacacatgcctcggcacgctgattccctcgctgttcccgtttattttactcgcgtgcctatgcacgaacagccgcgcggcgcaggtgctgtttcgcccgctttcccccgtaatgcgtcatgtgttccgcctacccgcctgcgccgctcccgccgttttgttggggctcaccgcaggctaccctaccggcgcgaagatcaccgcaaatttatacgcggccggaaagctcacaaaggaacaggcggcgcggctgctatgcttctgtaccgcgccgggctatgcgtttgcggcagcctatacgggcggtttattgttaagaagcgaccgcatcgggctgaatttattttttgcctgcgcacttgcgccgttacttctgggactcatcctgtcgcgctttgccgaaaaacccgaaaaaaacctaaaatcgccagaatctgctcccggcggcatcgtctccgctgtgcaggacggcattaaggccaccgtttccctttgcgggttcgtccttgtgttttccatgcttttggccgttttgcacgatgccggcatttttcagtttttatgcgggtttctctcccgctttgggtgcaccgtgccgctttccggcgcattgctgacgatgggtctggagatcaccgccggagtctcgcagtgcgtatattggcacctgccggtttattttttagcgttcgggctcggcttttccggcgtttgcatccacttgcagatcttctcctttttccacaaagcggggctgccgctgtcgaaaacgagatatgttctcgcacgctttttaaacggtctgctttccgctgcattttatttgctgctttcctattttctcccggcaaacacctcggttgccgtggaaacctcgcccctcaacaccgcgcccatggcgggcagcgcggcatcatccttggcgctcatcgcgctgtctgtgttctttcttctcacgtgtattctccgcagcggaaaaacaccgtcgaaaatttgtggtggaaattccaccgggaaaatgctacaatgagaacaactctaagagcaacctgaaaatcggaggcgacgaaagtgttcggacgcaaaaagaaaaaacaaacacccgctctgtttggcagccgcattgagcctgactgtgcttactgcgcgtttcatgcggacggcgtgcagaaaaaatgtcttgcggggcagctcggcggagagcactgtgcaaaatttcaatatgacccgctgcgccgcgagccgaaaagcgaacaaaagctcgggcaatacagcgccgaggaattcaaactatgaaaacttatcttaaagcgtttcgtttaaagcgcttttggctgctgcttttgctgcctgcggcgttccttttggacttcgccgcacggcagagcgcagattttgccgagtggtatgccgtgacgatctaccccgtgtacgcgcagttcttttccgccattacgggtgtcttcccgttttctgtcggcgaattttgtctgatcgcgcttgtccttttcattttggcgtatctcattcacggcgtttataaactcattcgtcataaagagggccgttttgcgtactttgtgcggtttttgtcggttcctgttctcatcgccacgtgcatcgcgtttttgtgcgtaacgaactacggcacgaaccaccgccggtacagctttgccgccgtcagcggacttaccgtgcgggagtcctccgccgaggaactttacgatgtgtgcgcgtatttaatcaacgaagcgaacacattgcgcgaaaacctgcccgaagacgaaaacggtgtatttcagctttcaaacgatgtttttctcgatgcagacgaagcaaaatcatcattcaacagccttcatgatacgtattccacgctctacacaaacggcaaaccgaagcccgtgctgttctcggaagtgatgtcgtaccttgacatcagcggcatttactgcccgttcacgtttgaagcgaacgtcaacgtccacatgaacgacgtattgatccccgtgacgatgtgccacgagctttcacacctttccggctacatgcgcgaggacgaagcaaatttcatcgcatttttggcgtgcctgcaaagtgacgacccggaattccgttacagcggtgtgtatttggcgtccgtccacgcgatgaatgctttgctcactgtggacagcgacctgtggaaccgggcggacgctttaaaaagcgacgcactgcgccgcgacattcggtcaaataatgcgtactggaagcagtacgaaacgcccgtttccgaggtctccgaccgcgtgaacgacgcgtacttaaaagccaacgggcaggaaaacggcctgcgttcctacggcagaatggtcgatctgcttctcgcctactaccgcgacgagctgcaatagacatagttttgggggagttctctatgtgtgaaaaaatcattgcggcgtgtggaaacgactgcgcggtatgtccgcgctacaacgtgccgccgtacaccaaaaccgcagaagaactgcaccacaccgccgagctgtggtataaaatcggctaccgcgaccacgtggtgacaaacgaggagattgcctgtaccggctgcaaggaagaaaactggtgccgctatcgccttgtaaaatgcgcgaacaaaaagcacatcgcacattgcggccagtgtgaaaactacccgtgcgacgtcattaaagcgtgcttcacggtgacaggctcgttcatccccgcctgtaaaaaagcctgtacaccagaggaattcgagacattgcgcaaagcatttttcgagaaaaaaaagaacctgacgcaaaattaagacgacaaaaggcctttgcaccgtccaaaacggagatgcaaaggcctttttatgtacgattatttattcgcgttcatctcgcggacttctcttaaaatgtcctcaaggtcatatttttcgggcgctttcggcgcggcaggctttgcctgcactgtttgtgcagccggcttcgggggatttgccgggcgctgctgcacgggcttcggcgcagttgcggcgggctttgcggctctcggtgcggcgctttgccgtggcgcgcgattcactgaggtctgcaccgcagcgcggcgcacgttctgtggctgcatggagaccggcgtttccggcatgatggggcgttctgcggtgtactccgccgacaccggcatcaccggcagctcgccggtgtctttatccgggtcaaaggacgtgggcacgcggggctctgtctcacggcgcgcctgcatctgctctcggcgcatgcgctcttcttcgcgtcttctgcggttgcgtcgttcctcctgctcaatctcatccagcacctcggcgcggtccgcttcgccgctgtcgcggttacgacttgcacgctgccacaaaatgatgctgacaattccgccgacgccgagcacgatgcacaccgcacccgcaacgaacagcgtgcggccgacgccgttatcggccttcagctcattaaagaacgattccgctccgctgctgtcttcgcctgcggtgtcggtcgtgccttccgtggtgtccaccgtttcggtgctgtctgtggtatcggccgtatcggcttcatccgcaaaggtaagcggcgcacacagcgcagcgccgagcaaaaccgccgctaaaacagcaaatatacgtttagaaaaagtatttctcataatccatttcctctttcgtgataacttttatgtgtcacgatttcgaattcatttttatttagtttagcatattttgcatggtgtttcaacggcaaaataaacaaacccgccgcttctctgcacggttcatgcagtcgaaacggcgggtgctgtgtctatttatatttctttagaaatcgatcttctctgcaatgtacgcttcaagctcgtcgatcttcacgcgctcctgctccatgctgtcacggtcgcgaacggtaacgcagccgtcattttcactgtcaaagtcatacgtgatgcagaacggcgtgccgatctcatcctggcggcgatagcgcttgccgatggaacccgtatcgtcaaagtcaacggaaaacttctttgcgagcgcatcgtaaacctcgccggccttttcgctcagcttcttggagagcggcagaatcgctgccttaaacggtgccagtgccgggtgcagacgcagtacaacgcgcacgtccggcttttcttcggtgccgaggttttcttcgtcgtaagcgtcgcacaggaacgccagcgctacgcggtccgcgccgagagacggctcgacgacatacggcacatagcgggtgttcgtctccgggtcgaaataggagaggtccttgccggaatgctcctgatggcgggtgaggtcatagtccgtgcggtctgcaatgccccaaagctcgccccagccgaacgggaacagatactcaatatccgtcgtcgccttggagtagaaggaaagctccttctggctgtggtcgcgcaggcggatattcgcttcgtccagaccgaggttcaaaagccagtttttgcagaaatccttccagtagtagaaccagtcgaggtccgtgcccggcttacagaagaattcgcactccatctgctcaaactcgcgaatgcggaaaatgaagttgcccggggtaatctcatttctgaagctcttgcccacctgacaaacgccgaacggcaccttcttgcgcgtggtgcgctgaatgctcgggaagttgacaaaaatgccctgtgcagtctccgggcggaggtacagctggctctttgcgtcttccgtaacaccctggaacgtcttaaacatcaggttgaactggcggatatccgtaaagttgtggccgccgcactccgggcaggcaatgttgttgtcggcgatgaactgctgcatctgctcgttcgtccagccgtctgcggattcgccggtgaagtcttcaatgagcttatcggcacggtgacgggtcttgcagtccttgcagtccatcagcgggtcggagaagccgcccacgtggccggttgccacccagacttccgggttcatgaggattgcggaatccagcgccacgttgtagcggctctcctgcacgaacttgcgtttccacgcgttttttacgttgtccttgaaaaggcagcccagcgggccgtagtcccaagagttggacagaccgccgtaaatttcggagccggggtatacgtagcctctgtttttgcagagcgccacgattttttccatggtcttttcttcgggcttcagaactttcttcatttgttaaactcctttcgcgccgctggctgctgcacggcttcgtgcagctggatgctgcgcttgtgatttatcaatcataccacgtttttcaaagatacacaactaccgcggcgggattttatacgaaaaagcggcactccgcagagcaccgcccgaaatttccgcttgtttagatttattcgccctcgtccgcgatgagctttttcatctgcggcagacggaacagaataaccgccgcgataactgtgaagatgagctccggcagcatgtaagtgccgttgtagcagaaggagtaaagccacgggtggcccacccaggaagcgccgaacgccacaaactcatcaaagtttgcaaagataatggcgccggaaatgaagtggcacacaaagcgcagcgcaacagccagcgccgtgccgcagcaaatgcctacataacccttcttgcggaaaatgcccgcaatgccgataaccgtgtatgccacgatgtaatcgagcagaatcgtgccgatgagagcagaaggcgtcatgccccagccgaggatgccgtccatcgtgatgccgaacgcaagctgaacgacggattccacaaaggaagccgcaaagccccacttaaggccgtacatgatggaaatcatggcgcagggcagcatggaaagcagcgtgatggaaccgccaaacggcatctgaagcaccttgatcatgctgagcacagcgcccagtgcgaccataaccgcgcaggccgcaagcttttttgtattgttgttcttcatagttcattcctccggctttctaccgagatttaggggataaagcggagaaaacaaaaaccgcgcacccattcggcacgcggcataaaaagcacttagaataagcgtattttcctacgtcggcattatccgaatcaggtaacaggtttcggcgttcacgccgctctcagccgactttatacgtcagcacccttttttcacattcagtatagcacggaacttttcgcttttcaaccaaaatttgtgttttcgggcagaaaacaaggcttttcttgattttggagaaacaaaatgatagtataaaagaaacataagccaacggcaacggtggttaaaagttttgcttaagctttttcaagaagcttaaagcgaacgtgtgcgttcgcttgggttcattagggcagcgccctatgtcgtcgtccgcagacgacgaaacaccttttgcctaacaaaaatcaggatgagaaccacaacagtcaggtggactgttgtggtgtgggagacacaattagggggtctcccaatgaatctacaaggcaaattcataaaataaaccgctaaaaccgatttaaactacggaaggacatataaaaatggaaagcacacagaacaaaacgcgctgtccgcacagcaaaaagtgcggcggctgccaactgcagaacctcgattataaggaacagctcgcgcacaaggagcgcacgtgcatccgcctgctcggcaaattctgccgcgtagagcccatcatcggcatggagaacccctaccactaccgcaacaaggtgcaggccgcattcggtaccacgcgtgccggacgcatcatctccggcatttaccagagcagtacgcacaacatcgtcgccgtggacagctgcatgacggaagacgaaattgccgaccgcattatcgtcgatatccgccgcctgctgcgcgatttcaaaacgacaacgtataacgaagtcaccgggcgcggctttctgcgccatgtgctcgtcaagcgcggctttcagaccggcgaagtcatggttgtgctcgtcaccggtacgccgatcttccccgcgcgcaacaatttcacccgtgcgctgttaaagcttcacccggagattaccacaatcattcaaaatgtcaacgaccgctacacctccatgctgctcgggcagaacgagaaaacactctacggccccggctatatcacggatatcctctgcgggctgcgcttccgcatttcggcaaaatcattctaccagatcaaccccgtgcagaccgaggtgctgtacggcaaagcgatggaatttgcggaactcacgggcaaagaaaccgtcattgacgcgtactgcggcatcggcaccatcggcatggtcgccgccaaaaaagccggacaggtcctcggcgtagaagtgaaccgcgacgccgtgcgcgatgcccgcgaaaacgcaaaattaaaccgcgtgaaaaatatccgcttcgtctgcgccgatgcaggcgacttcatggtagatatggcaaacgccggtgaacactgcgacgtgcttttcatggatccgccgcgcgccggcagcgacaccgcgtttctctcctgcgcgctcacacttgcaccgagacgcatcgtatacgtctcctgtaacccggaaacgctcgcgcgcgaccttaattttctcacaaagcgcggctatcgcgccgaaaagattcagcccgtagacatgttcccccacaccgaccatgtggaaacggtagtactgctttcccacaaaaagccagacggacatatcaacgtaaaagttgagtttggcgagggtgagggaaaagttccgcttgataatatcgcaaaaagagcggaaggctacaagcccaaagaacgagtgacctacaaaatgataaaggagtacatagaagcgaaatacggcttcaaagtacataccgcatatatcgcagaggtaaagagagatttaggcttgccaatgtatgatgctcctaatgcggtagaagaattgaaacagccgaggaagcatccgacagcggagaaagtggaagcgataaaggatgcatt

SEQ ID NO: 1687 - DNA, 236229 bp, Unknown
  gut microbiota DNA sequence
tggcgtcgccctccacccggagggcgtggatagaaataggatacctcggtagaggcgcgccggaaagattttgtcgccctccacccggagggcgtggatagaaattttaatcaccaccttcacggcacccacgagcttagtcgccctccacccggagggcgtggatagaaatttattcggccttaaacaaaacaagggctcgaatagtcgccctccacccggagggcgtggatagaaatcggtcgaatccccggtacttccgacgtagccgagtcgccctccacccggagggcgtggatagaaatattttcggtgacaaaaatttatctatcaatgacttgtcgccctccacccggagggcgtggatagaaatacgacctgcagcggagcgattgcattggtggaaccgtcgccctccacccggagggcgtggatagaaatatcatcagccgggcaatttgcgttgattgtgcaagtcgccctccacccggagggcgtggatagaaatatatccatcgcattgatatgggtgggagaagtggcgtcgccctccacctaaagggcgtgggtagaacgcaaatcgtgacacttgacttttggacgtgacatgcccccaagtctgcgaataaagccaaagatgcgccgggcatcaaaacggcggaacagctcgaaaagtgctttcatcggctgcgaaaagcggcggatgagggcgttcttttgccgttaaaaccggacattgcaggacagtataggacatcggcggacaactttcgcaaaacctctttacagaacaaatgtttttagctataatgagatacagaaagggggcggcagcatgacggagaacaggccgcgcatggcgatctgctacgattttgacaaaacactttccccggacgacatgcagacgttcacgctcatcccgtcttttggcattgacaaagacaaattctgggcggaaacggacgcattcgcgcgggaaaacagcatggaaagcaacctttcgtggatgttcatgcttgttcgctattcacgctttctcggaaaatccttaaaacgcgagtattttcgggccatcggtgcgcaggtggagctgtaccgcggcgttacggattggttcgcgcgcacgacagcgtatgctgcgcagcgcggcatcgagcttgaacactacatcatttcttcgggtcttaaagaaatcatcgagggcagcgccatcgcgaagaatttcaaacgcatttatgcctcctcctacctctacaccacggacggcgtagcggagtggcccgcgcaggccatcaattacacgaacaagacgcagttcattttccgcattgcaaaaggctttttggaggagtacgacgagcgcgtaaacgacagcatgcccgaggaaaacctgcgcattccgtatgagaacatcgtctatatcggcgacagcgccacggacattccgtgcatgcggctcgtgaaaagcaaaggcggctactccgtcggcgtatacgacccagagaaaaataaccgcgccaaagtatacaagctgtataacgacaaccgattaaacttctatgcgcccgccgattatacagaacggagcaacttataccgctacatgcagcagatcatcgacgaagtcgccgcgcgagaacagattaaaagcgagcgcgaaattctgcgtcagcccgccgaagcctacaaaatgcgctccatgctcgaaaagctcgagaccggctacccggaaaagctgaccccgcaagagattaccgagctgcaaaagctggaagcgatgatcaaatcgcgcactccgggagagatcgattgatggatgacgtaaagtactttccgtacggcgaaaaggagctcgcttatttacggaaaaaggacaagaagctctcggcggtcatcgaccgcgtggggcacattgagcgcgccgtagacgacgaccttttttccgccgtggtacaccacatcgtggggcaacagatttccacaaaggcgcaggcaaccgtttgggcgcgcgtgcagaacgccctcggcacggtcgatgccgaacacgttttgggctatggcgaagcaaatttgcagtcactcggcatttcgttccgcaaggcggaatacatcacggacttcgcgaaaaaggtgcatacgggcgaatttgatttaatcagcatcggcgaaaagccggatgaagaggtcatcctcgagctcagcgcgctcaagggcatcggcgtgtggacagcggaaatgctgcttttattctgcctgcagcgcccgaatgtgttcagctacggcgacctcgccattttgcgcggcatgcgcatggtctaccgccacaaggagatcgaccgcgcacggttcgagcggtaccgcaaacgtttttcgccgtattgcagcatcgcaagtttatatttctgggcggtctccggcggcgcgctccccgaactcaccgaccccgccgcgccgaaaccgaagaaataaacgtactttttcgcacgcatagaaaaagatagtcttccaaagcgttcgtttcgcttagaaagactatcttttttatatcgtttttatcataacgaaattcgtgagtcagacgccgcagcgctctgcttgctgttctttaatggccgcatagtcgcgcttttggaagaagccttttgcggtcaacgacgcgtgcgttatgacggtttttgcagcgacaaactcagtccttcgggactttgacccagatgccgggagtcttttcggcttccataagggcgccccaggcgctgatgatggagagcgtctcgctgtgcggggcagggatggtgccgtttttgaagaactcgacgagcgcctcaatgaagtgacggaagtaatcggagcgaatttccagtacggaattttccgtggagcgcgcaatgttcatcatgaacggcgagccctttgcgtagccggaaagcgttgcggtgcggccgtccgcaaagcgcagaacgccggtgtacacctcgtcgtttgtcaggtgcatgacttccgtcgcgggagcctgcatcatcatgaagatcggctccagttggtggatagcgtaatcctcaaaaccgttcggaccccatgcgttgacacccttgatgttcgttttatccgctgcctgatactcctccgcaaaacgcagcgcggaagacgaccagcacggcgtgccgctctgctcggcaaggtcgagcatacgctttacagcgaagtgatccggcgcgaaggttttatccacatagcagcgcttgccggagcgcagcgcgaggtttgcgagttcttcgtgctttttcgggtcgcgcggggcgagcacgagcagaacgtcactcttttcgatgagctccgcctgcgtcatcatgcgggtgagaccgtatttttcgcaccatgcgtccgttgtgaggccgccctcggggctgtcgatttcagcccaggcgtacacggcttctacctcgccgtttgagtaatcgtgcagcatgtgaacgtagttattggcgtgccactcgtctaaatagtaatcgataaaaccgactttgatcatgcttttgactcctttaaaccgaatttcaatacaactttccggcgtacttttccgccggtattcgcgttcattatagcacattccgctgttttgtaccgcagtttttgcgaaattttgaaagttcatggaaaaagcaaaccctttgtgtgaaatatgcaaaaagcgccccgaatgctcggaacgctttttgcatatttggaaattcggtgtggtttttgccgccttatctcgcgtttttcttgacgcgcaggcggttgatggcgcgggcaaggttcgcctgcgcggtgcggtattcgcgcacgctgcgcttttggaggatggcctccttcgcctcatcggcggcgcgctgtgcacgtttggcatcgatctcttccgggtactcggcagagtctacaagcacgaggatatcgttgccctcgaccttcaccatgccctcggaaacggcagcggtgcgccactccttacccggtgcgcggtaagagagcacgcccggcacgacggcggagatcatattgctgtgacccgccagaatgccgtactggccgaccgttgtgggcacgacaagcgactcgcactcgccctcgaaaaagaccttatcggcttcaagcaggtgcatctgaaatgtacgcatcagatcgcctccgcctctaactgcttcgctttcgcgatgacgtcctcgagcgtacctacgttatagaacgccgcctcggggtactggtccatttcgccgtctacaatggccttgaagccgcgcagcgtctctttgagcgggacgtaaacgcccggcacgctggagaacttttctgcgacgtgcatcggctgcgagaggaaacgctggatctttctcgcgcgctgcacggtgagctggtcttcgtcgctaagctcgtccataccgaggatggcgatgatgtcctgcagctcgctgtacttctggagggtctcctgcacttcacgcgcgatgcggtagtgctcctcgccgacaacatcggcttcgaggatacgggaggtggactccagcggatcaacggcgggataaatgccctgctcggcgatcttacggctcaaaacggtcgtagcgtcgaggtgggcgaacgttgtggccggggccgggtcggtaaggtcatcggcaggcacgtaaacggcctgaaccgaggtgacggagccgtcttttgtggaggtgatgcgctcctgcagctcgcccatttcgtttgcgagggtcggctgataaccgacggcggaaggcatacggccgagaagcgtggaaacctcactgcctgcctgcacgaaacggaagatgttatcgatgaagagcagaacgtccttgtgctcttcgtcacggaaatgctctgccatggtgaggccggagagggcgacacgcatacgcacgcccggggactcgttcatctggccgaagacgagcgccgttttatcgccgacaccgctttcacgcatttcacgccagaggtcgttaccttcacggctgcgctcgccgacgccggtaaacacggagtaaccgccgtgctccatggcgacgttgtggatgagctcctggataaggacggtcttgccgacgcctgcgccgccgaacagaccgattttgccgcccttcgggtacggctccagaagatcgatgaccttgatgccggtctcgaggatctcgacagccgggttctgctcgtcaaacgacggagcttttctgtaaatgcttttatgcggctcggttgcgggaacggcttcgccgccgtcgatgggatcgccgagcacgttgaacatgcggccgagcgtgttttcgcccaccggcacttcgatggttttgcccggagcctcaacctgcataccgcgggaaaggccctcactgccggaaagcatgacgcagcggaccgtgttgtcacccacatgctgggcaacctccatcacataccgccgtccgtccacggtaagcgaaagggcttctctgattttcggcagaacgccggactcgaactgtacgtcgatgaccgggccggagatctgtacgatcttacctgtattcacgttgttcacgcttccttcctgtgtttttgacgctgtgccttcgcaccggcggagacctctgtaatctcctgcgtgatggcagcctgacgcacgcggttatactgcaaggaaagctctgcgaggagcttttccgcgttgctattggcggaatccatcgccgtcatgcgggcattctgctcgctgcagaagctatcgatgagggcactgtaaataaagcccgaaacgtagctttgcatgatgttgttgagaaccgcctgcacggagggtacaaactcgaacggcgtggtgaccgccttttccaccgtatccgtctggaaataggcgcggtggaacggcagcagacgcgtgcagtgtgcagaggacgtgaggctgttctccatatcggtataaatgacaaaaatcttcttaaaatccccgcggtcgtagccctcaagcaggatgtcgcaaatttctctcgcacgctgcatggtggggttctgtgccgtatagaggaagctgtgctccatggggatattgtgctgcgtaaagaagtggcggccatattcgcctacaacgtagagcttcgtgtcgggatgctcatcgagcatgtgcatagcttccttgatgacgttctggttgtatgcgcccgcgaggcccttatccgccgtgatgacgaggcacgcgtaggtgccctccagcggcggctcgccctcggggggatagaaatagcggctgtccacgtcgttctgggtacggaaaatacgcttgatctccgtgcgcagcgcctcgaaatacgggcgcgtgcggtccagatcgttgcgtgctttgcgcagctttgtggaagcgataaggtacatggcgttcgtgattttacgcgtatccttaacgctttcgattctggttttaatctcttttgtattagccatagcgaaaaccgcctttccgagcgcttacgcgttctgcgggttttccgccttgtacttttcgaggaattccttcgcgactttcaaaatctcttcgcggtcggggtcggaaagctgaccggtggtatcgacacggcggcagacatcgctcatattctcctcggcgtacttgatgagctccgtgtggaaacgacccatatcgtcaagcgggacgtcctgcatgacgtggtgcagggcggagacaagcgtgatgacctgatcgtgctggctcatcggatggtactgcggctgacgcagcagacgcatgaggctctgaccgtaggtgagctgacgctttgtggtctcgtcaaggtcgctggagaactgggtgaaaacttccatttcgcggtactgggcaaggtccagacggatgccgcccgctgcctttttcatggcctttgtctgggcgtcgccgccgacacgggaaaccgaaagaccgacgttgacagccggacgctggccggagaagaacaggtcgctctcaaggaagatctgaccgtctgtgatggaaataatgttcgtcgggatgtaagcggaaacgtcgcccgcctgcgtttcaacaatcggcaatgccgtcatgctgccgccgccgagggcatcggaaagatgcgcggaacgctccaacaaacgggaatgcaggtagaaaacgtcacccggatacgcttcacgacccggggaacgctccaaaagcaggctcagtgcacggtacgcaatggcgtgctttgaaaggtcatcgtacacgatgaggacatctctgccctgatacatgaagtactcgccgagtgcgcagccggcatacggtgcgatgtattgcaaggaagccgggtcactggcagatgcgttgacgacgatggtgtaatccatggcgccgcggcgctttaaggtctccacaagctgtgcaacggagctggacttctgaccgatggcgacatagatgcaaacgacgttcttgcccttctggttcaaaatggtatcgagcgcgacggcggttttaccggtctggcggtcgccgatgataagctcacgctggccgcggccaatcgggaacatggaatcgatggcgagaaggccggtttccataggcgcgttgaccggctggcggtcgatgatgcccggtgcggggcactcgatggggcggtagccctcgacgctgatgtcacccttgccgtcgatcggcgtaccgagtgcatcgacaacacggccgaggaagccgtcgccgaccgggataccggcggtcttaccgcttctgcgcacaaggctgccctcggtgatctcggcatcgtcgccaaagaggacacagccgatctcattgcggcgcaggtcctgcaccatgcccttaacgccggaggagaacaggagaatctcgccgtaggcggcatgctcaaggccactgacaacggcgatctcatcgccaacggtgagaaccgtaccggtctcttccgcttctgcggacggggtaaaatcttcaacggcttccttcatcagcggaatgacggaatcgctgccggactttaacgcctttagcttttcttcaaactggcgcagacggcttttgaggctccaatcgtacacatcggtgccgacggtaagcgtgaagccgttcagcattttatcttcttcaaaggtgagcggaatctcacagccgtaggtacgcagcaggaattccgcaaagcgtttttcctgttcggcatccgggcggcggctgccgcggagaacggctacagccttttcatctgcattacgcattcggctctcccctctctgcctgatcgaggaacgcgtcatacggatcgccgtctttataaacaagcttcttggtcgcttccatagcgagctcggtaagctccttctgtgcgtctgcgatcatcttatcatgtacacgggcagcatccttctgcgcatcggcgacgatcttatccgcctgtgcatgggcatcggaaagctgctgctgtacgctgcggtcgagctctttctgcgcttcggttctctttgcgctgatctcgccctcaacggacttgagctgctcctgataatccgccttgatcttttcggcggaatcgagttcactttgggccttctgtgccatttcggcataatgcgcttcgcgctttgccatgaagttcttgaccggcttgtacaaaaggaaatacaggccgccgaacaaaatgacgaaattcagtacatgcagcaaaatctgctgccaatcaatattcagtgggatgttcacgatctgcactctcctttacaggacgaagatgatgaggataacaacgagcagggcataaatgatggccgtctcgataaagacgaggccgagcatgagggtggtacggatcttgctttcagcctccggctgacgtgcgatgccctcaacagccttacctgcggagaggcccataccgactgcaccgccggcggctgcaataccgactgcaatagcggaagcaagtgccttaaggccagttgtgctgtctgcggtggtggctgcagcttctactgcggtttcggctgttgccgtggtggttgcggcatcgccgtttgttgcggcgaataccggaatggagatggcgaggatggcgatgactgccagcagaatgatggcaagcttctttaactttctctgttttgcgttcatgatattttccctccgtaggttaattttcagcttctgcttttacttttttctttttcggttcctgcttctcggaaacctcgccgaaatagagcgcgacgagcatcgtcaaaacatatgcctgaatgagcgcgtgtagcagcgtgaacataacgcccacgatgaccggcagcacaaagctcagattcacataataatacacaagctccgtaacgagcaggccgcttaaaagcgcgccgaacagacggaagctcatggaaatcggcagcgagaactcctttaaagtgctgcccacgcctttgaagccgttatacgcgataccgccgcccagaatgacgaggtacgagaagcaacccatggcgatggcggcgttgacatcggacagcggcgccggaagcgtgatgggcgagccctccgttgtgatagcctgaatgccgaacagctcaaagagcgtgccgatgaaaatgtacgcgccggccgtgaagatatacgcaccgaggaagccgctacgccccgggctgttggacttagccatgccgtcgaacaggtctaccgcctgctcaaggagcatctggaactttccgggcaccatcttaaagcgcggaatgacgaaaatgcgcacgatgaccgcaaacaccagcaagatgcccgagaccaccatggcggagatcagcgccgggttgacatctttgatgccgaagaggctgattctgttcgtctcatgcagaaccgcgtcacgcatggtcacctgaatcgtttcggtcttctgcaccgaaggaaccagaatgcttgcgacgagcagcaccacaatagcgcagatccacaaagccagctttgttttctttgctttcattgtttttccctttctttctcaaaattttaccttccatttcaatatcaccgggcaaaaattcccccttcagcgctgcgccccaaaagggcacacgaccgcatctttcgccgctgtgaacagcagcaacaagacacggtcacaagagcacacgtttttgttgacattgaccaaatatcttgttacttttttgtaaactgtatttggaagcatctgtattatacgcacattaaatcgaattgtaaaatgttatattgacatatctactatttcatttttgatattttagtaagctgtatggaatttcattatgccgtgcgctattttgctctttacgaataaagacaaggtggaacggcgcgcgggaaaagtcaggctttttcggcttgacaggggctttccccttgctttatactggagaaaacagatggaaacggggagacaatatgcggacggtttataaaaacggcacggtttacacgggaaacggctttgtgacggattttgcggtggaaaacgggaaattctgctttgtgggcgagacggataaagccacggcagacgaagcagtcgatttagacggaaaattcgtctgcgcggggtttaatgactcacacatgcatgtgctgaacctcggcaatgtgctgacaatggcaaacctcggcgcgcacacgacgtctttaaaggagatgctcgactgtctgcgcacctatataaaggaaacgggcgtaacacccggcacgtgggtgcaggggcgcggctttaaccacgattattttgcagacgagcgccgctttccgacacggtgggatttggattctgtctcgaccgagcacccgatctgcattacgcgggcgtgcgggcacatctgcgtagtgaactcgaaggcgctggaagtgttgggcattacgaaggacacgccgcaggtggcgggcggcagctttgctttagatgaaaacggcgagccgaacggacaattttttgaaaacgccgtggcggtggtgtacgcgggcatcccggagccggatgaagcgcagctttgtgcaatgctgcgcgcctcctgcaagcggctgaaccgttacggcatcacctcttgccaaagcgacgactacgagacgttccccggtgtgccgtacaagacggtgcagaagcttttgagaacgccggggctgatgacggtgcgcgtgaacgagcaggcacagtttacgaacgtagaggcgctttctgaatatatcaagagcggcgatgcgtattttgaagacgatatgttccgcgcgggaccgctgaagatcatctcggacgggtcgctcggcgcacgcacagcgtgtttaagccgcccgtatgcagacgatgagaacgcacgcggcattccgctatacacgaatgcggaattgaacggactcatctctcttgcgaacgaaaagggactttccgttgcggtacacgccatcggcgacggggcgctcgacaacgtattggacgcttacgaaaaggcgcttcatgagcacccgcgcgacgaccaccgacatggcatcgtgcacttccagattgtgcggcgtgaccagattgagcgcatgaagaaattaaagctgcgcgtgaatttgcaatcgatcttcctcgactacgacacgcacattgtgcgcgagcgtgtgggcgatgaattggcgggcacaagttacccggctaagacgcttttgaacgcgcgcattccgttctcgaacggctcggacgcgccggtagaggagccgaacgtgatgcgcggcatggaatgtgcggtgacgcggcgaagcattggctcgacggacgcaccgtatcgcccggaggaagcgctgacggtacgggaggctatagactcgtttacaaaaagcggcgcggtagcatcatttgaggagggcaaaaagggcgagattgcaaacggacagcttgcggactttgtggtgctttccgaagatccgttcaaggcggacgccaacacgctgcactgtattgaagccgaggcgacgtatttgggcggcaaatgcgtttacaaaaaataaaacgatgaaaattccgggtaaggcttgtctttgcccggttttcgtttataatggatagggcgcgtgtattcggtgcgctgcttatttttctcaggggagaacatttatggataagtttacatttcatccgatcaaatcgctgcggtctgacccgaagctgcgcatgctgtgccttttcggcattgagggctttttattgcagtatgccgtttcgctttacacgctggcgaacaatttgtatgcgacgaatcttggcgcgacggatacgcagatcggccttgtacagatggtgccgaacatggtggcgggcatctgtatgattccggtgggattccttgcgaaccgtacgaagacgagccgcacggtgccgttcgtgctggcgctgtttttgagcgcggcgtattttgcttacggctctgtgccgctgttcggcgagcaccgcatgacggcattttttgtgtttctcggcatgacggtgggcggcattgcgctgtataacgcgcagtggcagacattcttcggtgacgcggtggagccgggcctgcgcaacagcgtgttcacgttccgcagccggtgtctgttctttgtgggcattgtggtgccacttttgtgcggcaatgtcatgacgctgatgccggacaccgagggaaagctcattgtgctgcgcattttcttttatattgcaggcgtatgcatgcttttgcaggcgcttgtgctgcgccgcatcccctgtccgccgcgcaaggcggaagaaaagcaggagatgggactgaaaatgttcccggaagctttgaaccagatggtacgcagcaagccgttccgcggctttttcatctgcatcatgctgttttacctttcgtggcacctggactggagcctttggtacatagcggagacaaaatatgccggcatgaacgaagcgcagctgagcttttttcaggctttgtgttccatttgccagatgattttcatcggctttttctcgaaactgtgccgccgcaaatccgagcattttacaatcattttcgtatgcgcaggcctgttgctctgccccattacggtggcttctatgacgttgctgccgcaaagcgcgcgtatgccgtactttatgattctggcgctcatcggcaacattccgcagggtgcgacgaacatgtgcgtggtgcagctacttttgcaggcgacgccgaaaaagaaccgcgcgcttatcatcagcatttacacgctgtttgtgacgctgagcaactcgcttttgccgttcttcggcgtttcggtctacacggcgctcggcgcgaacgacacggcgatcttcacggtgaacgtgatcgaatctgcggcgcgctttggggtgctgattatgatgatcctccgttaccgcatgatgaagcgccgcggcgacttgttccgcccgttgtgcgaggagtaaggagaaacgtatggctcttgttttataccatgttgaagacgctgcgaaggaaaagcagctttctgcactgtgcagagagctgcacctgacggcaagacggctgacgaacgccgaccgtgaccgcgcagttgcaacgctgtgcggcgagaaagtgaacgcgaacgtgcagaaagccccggcgggctacaagctgccggaggtgctgattttttccggctttgcgagtgagatgctggacgtgttccttgcggcgtacaaaaaagcgggtatcgcgcccattccgctgaaagccgtacacacggagcacaacgacaagtggagcctttacgcactgtgcgaggagctgcgccgcgagcacgccgccatgctgctgcgcggaagctttggaaagtaaggttattgataatttgaagataacatgaccccgaaggtttgaaactcggggtcgttttttatgcaaaaagcgcccgcagaagatgactctgcgggcgctgggttttagttttcgtttaagggattggggccggcgcctacgtcgtagatctggatatagaactgcgaattggagacgagaagcatataggcggggtcgtagctgcggatgggatagagcgtatcgtaggctttacgcacctcgccgtttgcgagctgctgcgcgccgagacggtaagtcgcctccgtgatgcgggaggcagcgtcgccgtaatcgccggcggccttgaactccgcgatggcgttttcgtaatcggcgttgttgtaatactgctccgctttcagcgcgtggatgcgcagaagctgcgtcgggcagtcttcatattcgccgagctttgcgaaaatttcggtcgccttgtcgtactcgccgtcttcgacgagctttaatgcctgcgcgtagtaggcggcgtcaatcttcgggagaaggtctttatcggtgacatactcaaaataggtaagcgctttttcttcgtcgcccttttcgtagaacgcgatgcctttatcacagaatgcggcctgcattttcttattctgctccgcgttgacttctttaaaatgtgcggcggcagactttaagttatccgcttcgagggccttcatgccgagctcatagtgacaggtctcgattttttcggcggcatccttgtaatccttgaggggctcaaggagatttaacgcgtcttcgtatgcaccgctttcaaacgtctttacggcgcggcggtactcggcctcggtgatccgatctttgctgtcttcgtaatcgccgagggcggtgaaggcttcgatggcttctgcaaatttctcgttttcgagcaggtcgcaggcttttttatactctgcctccgtgatgcgggcggcgctgtcgctgtatccgtcgagcgccgtaaacgcggtgatggcttcatcatacttgccggcttcgagcaaggcggcggcatcgttatagtggttctgcgggatgatgtagacgatgagcaccacgacgaacgcggcgatgaggacggcgagcggaatggaaacggacaggaaaattttgcggtggagccgctttttgcgggcagcttcctcagcggcagccttttcctctgccgctttgcgggcggcagcttcggcggcggctttttcctctgccgctttcttttctgcggcgatgcgggcggcctcggccttttcagcttcagccttgttataggcttcgaggttttctttcagcttttcttcgtcttcaaacagtgcgtgctggggcccgtactcggcaccgcaggcggcgcatttttcttcatctttgtggttcacttcaccgcaggcgcacatccagaggtctttgtattcctgcgggacgaactgcgccgcagcttctttatcctctgccatttcggtgaaatcgcgctgatactgtgcgcggaggtcttcgtcctccatgacgtccgcgattttcgcctgttcggggagattttcaaacagcagtgaggcactgccgttccagaacacgtcttcgccctcgaactgcaccttcttaatggcgacggagaagctgtacgcggcgtcatcaacgtcgatctcctcgtctgcgccgaagaccgcatcgcggcccaaaataggcacgagatagcggcggtcgcgcacgacggcgagctcgtttgtggctttgtcgaaaatgtggatatcgacataaacgctcgtcacggcacgggggtcgatattgcggaatgcgagacgcaggaatgtgcgcggggaaaccgcctcttcctgctctgcggggagagtagcttccgcagtttcggtctcttccgcttcggcggacgcggtgggctcttcccggtacagcgcgccgctttgcagcaagaccgggcaggactctctatattgatttttcagttcaaaaaacggctcaaaatcagccatagtttctttccgtcctttttatctgcttatcgtcgaggccgttgtggcttcgacggttttcacacaatacatactcagtttaattatacctgattaggacgaaaaagcaagaaaaaagtgcgtgggtggggagaaagtttatggggtctcggggcaacgcccagagccgccattcgcaaatgacggaatactttttgcctaatcgaagatcaggaaaatagaaaaaccgtccagtggacggtttttcgcaagaaaccctatcaagggggttcttgaaaggtgagctacgcgagcctttttaaatgtaacgttgtatttcttactttaagaacggcagcttgccgatgatggcggcgtcctttgctttgccgctgcatacctggaagaagcagatgatgcgcacgacgaagagaattgcaatgcagacagcgccggcaatcggcacgatgaacgtgaaagcaagcacagcggaaacgatgagcagcagggtgctgacgatgtcgagcttcaacgcctgacgggaatggaacgccgcgtatttgctctgcggtgccgcaagcagtgcgatgatgatgccgacagtgccgagaatgtacgctgccatggcgatgaccttgttctgggagacatcctccgggtcgaactctgcggtgtgatctgccgggtcatacgcaggctgctggggatagaccggctgctggtatacgggctgctgcgggtaaaccggcggctggggctgctgctcgggtgcctgcggctgtgctgccggctgctccgggatccgggtgggctgcgcctgtgccgctacgggcgcaccgcaagctgcgcagaaggtgccgttttcggggatctgtgctccgcatttttcacaaaaagccataaatttctaccgtcctttcgcgcagatacccgcagtcgacatgccgccgccgtttcgctgcgcatcaatttttattgtttttattataacaaattcgatttcggttgtaaatgcttgtcaggaaattttaagaaagaagaaaactcccctacggagcagaccgcaggcgagttttctccatttggagcgtgtatctaaagtttgatgtccagctttttggcaagtgctttgatgtgctttgtggcttcgatataatcgacctcttcggtcatgtgctccagcatcatgcacgcgcggtcgtcgagctttgccatgcagcgcaggtacgtttcgtaatccagctcgccgaggccggggcggcactcatcaagatgcacggtcagcttgccgcttagacgaatgtccttggcgtggcagcttttgatttgcgtgccgagctttcggaaccactcttcgatgacttcaccgtttttgtagtacagctgcggcgagcagatgatgttcacggggtcaaggtgtgcagcaaagcccttgcggtcgatggccttgatgagctccacgtaggaatctgccgtatcggggtacatccacggcatgggctctaaggaataggccgttttttgggggtttaccgcgtcgatgatgcgctgcgtcgttgagacgatctcctcgaacgcgcgccttgtgaaattatccttgtgcgggccgtcccactgggtgctgtatgaacccgcgatgttcacgcagcagtttgcgccgacgtaatccgcaagctccagttgatgtatggctcttgtgacatttgcctcgcgctttgccgcatcgcggtctaacgtgttgttccacacgccgatctcacaaatgacgaggtcgttttccgccgccgcatttttatagccgtcgatgatgctttgcggtgcggtatggtctacggggaaatacaccgcggaatagccggcgtcctttgccgcctgcgcccattcctccggggtattccattttttaaagataaatccgccgaatcgcatacatgtccctccgttttatcctaaatccacttttacccagctttttttcgccgaggactttcttgccgcttccaaggctgccagtgtgttgcggccgtcgagcccggtgacaggcggcacggttccgtttaaaaccgtatcaacaaatgcatcgatgatgccagaggaaagctgattggtattggtgctcatggggcttacatggtggcgcgcgcttgtgccgtcgcgtagatcgaccacgatgtcgtcgagctcgctggcgaagattttcatggtgccctctgtgccgtaaatgacggtgctgttatcctccacgccgtagttcgtccaactgacgatcatggtgccaggaatgccgctgcgcattttgaacacgcagatggcgttatcctccagatcgatgagattgccctgcgggtcgcgcttatcgagtgtttgcaaggtagcgaagatgtcttcaatctcatcgccgagcaggtagcgcacgaggtccaacttgtgcgagccaaggtcgcccagaacgccaaagcccgcctggtttttggagaagaaccacgtgttgccacgctctacgctccacgcctccgggccggcatgtttgaaattcgtttgaacggaaaggattttgccgatagcccccgcctccaacaattcctttgcacggatgtgcgtgcgcacaaaacgttggttgtggccgagcattaaaatgtgcccggtctctttttgcacatgaatcatctcattggcttcgtttacggaagccgccatgggcttttcgcacagcacctctttgccggcgcgcaaagcctgcatggtgtgcgtgccgtgcaaaacattcggcgtgcagatgctgacggcctgtacgcgctcatccttgaggaggtcttcaaacgtctcaaacacatcgccgccgtactgctgcgcgagcgcttcggcacgctctttgttcttatcataaaagccgatgatttcggtatggggatttgccgcatattccggcgcatgacgcgtgcaggcgattttgccgcagccggcaatggctacgccgattttcttttcagccttcataacttctgcgtcctttcgcttagggtatcctgtttcagcgcaccggtttgatgttgaggtttatgccgagcatgtcttcgctgtctacgatcgtccagctgctgcccggataaattcccacagtgcggtctgtatcatagcctgcagctttgagttctttgatgatctcgtcgcgcttgtcgccgacctcaaagccgatgtggtgcacgccgttgccgtgcttatcgagaaactcctgaaaagagctttcgccgccgacgggctcgtgcagttcgatgacaaatccgttcatctcgatattgcagactttgaggtcgcaggagatgggattgccgcgatatttgtaattttcgttaccctctaagtgattgatgcggatttccggcacctcgatgccgagcagctccgcccacttttttgccgccgtttcgatatccgaaaccacgatgttgatttgaataaagccgtttttattgacaggtgtattcatggtaaaatgctcctttgctttgtagaacgagaggaatttgaaatcagccttttacactgcccataacaaggccggtagtgaaatatttttgcaggaacggatagatgcagaggatcggaatggttgcaagaaacagctgcgccgcgtttgtggtgcgcgcgtttgcgaggttgatgaaattgccgagctcctgactgacgttcgttgcgttgcggaaaaaggcctccgggttgataacgatggtttgcaaatatgtttgcagcgggtatttgtcgaccgttttcatatagatcatgccatcataccagctgttccagtggccgacgaaggagaacagtgtgacggtggcaagcgttggtgtgcacaccggcagaatgacgcggaacagcgtctggaagtgaccggcgccatcgatgtacgcggcttcctccagctcgtgcggcaggctgcgcatgtagttcatgacgaccagcatgttgaaaacattcaatgcaccgggcaggataagcgcccagatagtatttaaaatgccggtatatttgacgaccatatacgacgggatgaggccgccggaaaacaggatggtgacgacaaagaaccacgaaaacacgttacgcagcgggaactcctgcttcgatttggagagcggatacgccgtgaacacaatgagaatgaggttgagtgctacgccgagcacggtgcgctgcacggagatccacagggcgcgcagaaactggctgctgctcatgatgaagctgtacgccgctgtattgaagccgattggccagaacgtgactgcgtttgccgcgaccgctgttttgttagagaacgaaatagcaagcaggttgataaacggcagcacgcagatgaggccgaggaacgtaagtacaatatagttgatgaccagaaagacttttctggagggtgaggatttcgatttcgacatgagatcaccgccttttccgtcagaagattcggtaaccggcgaagcggtctgccagccagtaggatgctacgatgaagatgaatgaaacaccggatttaaaaagtcccgccgccgtggaaagcgcatactgcgcgttttcgatgccgaggcggaagacgaatgtatccagaatatcacccgtggcataaacggccggggtgtacatgttatagatctgatcgaagccgccgtttaagatgttcgccatgctgagcaccgtcataagtacaatggtgcttaaaaggccgggcaatgtgatgtggatggtttgctgaatgcggcctgcgccgtcgatctgcgcggcttcatacaggttttggtcgatacccgtcaacgcggagagataaatgacagagccaaagccaaagcctttccagatgtctgtaaaaatcatcgtaatggggaacgttttctggtcactcaaaaaaccgatgggcccaagaccaatagattgcagagcaccgttgatgacgccggtctgcgagaggatatctttgaaaatgccggccaaaatgacccgggagaggaagtgcggcaggtagacaagcgtttgatacgtgcgctttacgccgaccttcgcgacttcgtttaacatgagtgcaaagagaaccggcaccacgatgccgccaatcattttgcaaagagagataaagaccgtattatagatgacctgaccgatggtcggcatcgtaaaaaggtttctgaagttttcaaggccgacccattctgatccgaagaagccgtttgcgggcttgaacttctgaaacgcgatcaccgtgcccaccatggagccgtagctgtatatcgccaccaaaaggactgccggcatcagcattagaatcagtgggatctggcgtttaaatctgctgggtgctttttttgtttttgccatacgctttcaccatcttaaaagaaaagccggggtgagcgataccgcccgccccgggaatccgttttctttaactttaaatcatcttattctgcaggatacatttcatccagcgcgtccagcgttgcctgaccgcctgctgcgagccattcttctacaaacgtatcgaagtaatcgaccggcttattgcccgtgatgatatcgacaaacgttgtatcgaccatatctccgaggacggaggaattctgcagccagatatccggcatttcatttgccatcacgtttgtgacgagccagcccttagactggtaatcgagcgcgatcttcatggaaccgccgtaaccgtcaatgtacatctggccccaagtgccgtatgcgttggtgtcgtccttcaaggaaccgtcttcaaaaccgacgacatagttgtaatactcaagcgccgtgccggcgaggccgtcggaggtgcctgcttccagtgcttcgtggataaccggtgcgaagttttcggtcggtatgccgatgtagatcgggcaaagtctgtactgctcgtttgcccagtaggtctggaagtcgttcgggtcctcagaactaatagcgacctgctcgtaaaggttcagaatcttgataatcgcttccgggtgctcgcactctgcactgaccatgaagaggtcgccggtctggttggagttgatgcccattttcggctcgataccatcaacggtcggaatcggatacggacgggtaatgacgccgtcctgctgataagaatagttgaacggatgccatgtgccccagttcatgtgatacatcatgccaagtgtaccgtttgtgacttcttcttccatggaagccacgtcttcggaaacgaactcagggtcgatgaggccttcttcgtacatctggtgtacaagtgcgaggcagtctttcattccgggctgcaaataagcgaacgtcattttgccgtcatcatcgcgatagaaaacgccggtgttaccgtagcccggaacaccgtatgcgcctgcaagaccaaggagtgtaccgtagttcgactgcaccacgctgccggcgaggccgaagccgtaggtatcatcctgaccgttgccgtccgggtcttcaaaggtgaactttcttgcaagctctaccatttcgtccacggtcttcggcggttcggaattggtgttttccagccagtcatcacggatccagaggaacgctgcctgatggaagttatcgttcatatacgggaaggcgtagagttggttgtcaatcttagcgccttcaaacgcatctgcatattcggtctcatacgcctttacggcatccgttgcatactgctcaaacacatcgccgataggctgaatgtatccggcttcctgcgcttgtttgaaaaacgttctgttatcgtaacgcacgacatccgggaactcgccggaagcgagcattacgttcatcttgttcttgtacgcgtctgtggaaatatctgcagagaatgcaacttcgaggtcgatgttgagtttttctttgatgagtcttgaccagacgttgtcatcatacgtatcgccgtctttgaactgctgcacggcagaagcctgcacagcccaagtcaacttgaccggctcttcgtacggggtgagcgggccgtcttcttccgccgaagctgtactttctgtgccggaagaggtgctctctatgccggacgatgtgctgtcagaattatcggagccgcctgcgcaggccgtaaggcccacgagcatagcaaccgctgttaacgctgcgagcgctctttttaaggtcttcgtcttcattatacttcctccactaaagttttaagaaaaggtgttatacttcccgtccgcggatgcggtagcggacgtatgcaaactttttgctgtcgggagaccaggaattcacgttgatcgtgccctgtccgccgaaaagttctacgatggtcttaaggtcactaccgtctgcattcatcaggcgcagctccacgtatttgtgcggtacatgttcgcccggtgcaacatcaccctttttgtacgcgatcataacgactttcgttctgtccggcgaaatatgcgggaaccacgtgttccagttttcgtcaaatgtcatctgggtctgctcggtaccattcgctttcatgcgccacgcctgcataagaccgctgcgcacggaattgaaccagatgtattcgcctgcgctgtcgtactctggaccgtcgttgaggcccggcgcatcggtgagacgtgtttccactccgccttctgccgagatggtgtacacgtcgaactcgccgtttctttctgcgcagtatgccagcgttttgccgtccggtgaccagccgtgcaggtagctcggcgcaagtggggtgataagccgcggcacgccgcccgaaagcgaaaccgtatagacgcgcgacttgccgtcttcctttacgccgtggctgacggcaatgctttcaccgtccggagaaagcacgtggtcgttgttgcagttggtgacaaaatccattggaacctcggtgctttctttcgtttcaagatcgaatttgaagatcctgccgtcgctgttgtatgtcaaatatctgccgtcctttgaccagttcggcgcttcgatgagatacgggaactcttttatcacaccgtgcgtgtcggtctccacatcgtagatttccaaaatggactcgtcgtcatcgcggtaccacggatcatttttgtcgattgccataactataactcctttctttgtagcgttttgccgccttatttgcttttctgaggacatcataacacaataaacacgtgttttcaagaggcgatttgcgatttgaacattctgttacgtaaactacacgtgcgtttgtgtacttcttacaaattaagctgtttttagcaatttttcaaaaaatcatattgacatccaaacgggtcaagtagtagtatttaccttgttgaacccgtgtttataaccattcagaacaaaatcctttgagcgctgccgatttttcgcgccgcgcaccgttttcctttactttttccgggtttcgcattacaatagagatattacagagcgcgtatttcggcccggtatcttcggataatcgccctgcattggctccggcagacccgcagaaaggatttttgaatgaaaagactgaacagcaatgatattgcgcgccttgcgggcgtttcccgcagcacggtcagccgtgttgtgaacggctattcaaatgtgccggaggaaacgcgcgaaaaagtgatgaaggtcatcaaagaaaaccactattacccgctaatctccggccagcttttgaccggtaagaagacaaaaaccatcggccttttctggttcagccgcaaagagatcgcgcgcgacccgctgacaagcagctactttatgcacgtaatcgatgccgcggcccagcgagattatcttgtgctttcctgcattttagacaatcttacagacaaaaagaacgtgaattatattcgcaagattttcatggagggccgcatagacgccggcattttcgttggcaccaacaataatgaaccgctcattgacgagcttgtagggctcgacaaaattgtgggcatgttcgacttttaccatgagaacgaggatgtgccaaaccggctctccgtcaactttgaccgcgattccggtgaagcgaccatcgactatttatattccctcggccatcgaaaaattgccattattgacggcgatttacggcgtcttagctgtattcaccgtcacgaaagctacatgcgcggcatgataaagcatcatttgcccatgcaaaacaagtggatgacctacggcggcattgtgcaggaatccggctatgaagccgcaaagcgccttttacagggctgcatggacgacctgcccacggcaatctgcgccaacaatgacggcgtggcgtttggtgtatatcaagcatgctctgagcttgggctgcgcataccggaggatatttctgtagtgggtgcagacggacaccaaaacggcagcaactgtacgccgccgctgacgacctacgcgtttgactttaagcagatgttccaatcccttgtagatcgtgtgattgacacggtggaaggcaaggaaggcgtgccgcagactgagtttatccccggccaccttgtggaacgtgcttcgtgcaggcgcattgagctgccgtgagttaaaaatttttcactttaaaacctctagccgccgcgaacggctttcactgatttgcggcggtatattccgatgattttgtaaacacgtgttaatttagcggtatatccgctactgataaaccgggcagtcgctgtatggcgatacccaaaaatttctaaaaggattggtgattgatatggcaggtattcttggtacaagcacgctcgcacaggtaggatttattgtgcgcgaccttgagaccacaaaggaaaaatttgcggaattcttcggtgttccggtgccgccgagctttgacggcggcaaatttgaagtgacaggcaccacagtggatggtcagccggctccaaaagccaactgcttgatggcatttttcgatgtggggccgaacacgcagatcgaactcattcagccgaacggcgagaaaagcacatggcaggatttccttgacgaacacggcgagggcattcaccacattgcgtttaaggtagaaggcacggacgagaagatccttgccatggaaaccactttcgatgcaaagtgtgtgcagcgcggcaaatacggcggcggcaacggcgaatatgcgtacctcgatgtgcacgaggatttgaagtgcctgatggagacgctggaaagctattgattgaaaggacggtgcgacccatgaatttcatagtaataggcgccacaaagggacttggcttgtgcctgacggagcaattgcttgcagcgggacacaaagtggcagcgggtgcgatcgtactttctcctgcactttccgtgctgaaagagcagtacaaagagcagttactaattgccgaggccgatgtgacgaacgaggagcaaattacggcatttgcaaaggtcgcgcacgattttctcggtgagatcgacgcactgtgcaatgtggccggcgtgctcctgaataatgaccgcataaagcttctgcacgaatgtgacatcgcggagctgcggcgctcatttgatgtgaacaccgttgggcctgttattgttgtgaaggcgttttacccgcacctgaaaaagggtgcaaatgtctttaccgtgacctccgagggcgtaggtattcgcagctgcgggacttgggtgccgtgctatgggctttcaaaggcagcagccacaaaggaaagcggtatttttaacgcttccgtttctgacgtcaatttctttgccgtgcacccgggccgcatgaacacggatatgggccgtacgacggcacagattgagccggaggaatctgcctcaggattctgccgccttttgacaggcgaaacaccggtctccagagacaactggtacattgactataagggcgatcgcatggaagcctgatttgaaccgattacgagcgatctgaaataaatacacctaaaccgagaggcgcatggaagtttttctcccttccgtgcgcctctcggctttatgttttacttttaaactgctggggtgaaaggccggtttgggttttgaaggctttgtagaatgtggaataatcggaaaagccgcactcgcggccggcttctacggcagggatgccttcgcgcagcatacggcgggcatgggtgagccgaagcgccatgatgtaggcgtacacggtggaattggtatatgctttaaagtggcggtttaagtacgatttgctgacgaagaactctgtggcaatgtcttcgagcgttaaaggctcgctgaaatgctccgtgatatagcgaatgacctgcgggatgacctgtgtttcattgcggtgcgtggtatcgataacgccgtaggagcggaagatcgtccacaggtacagctctacggcgccggcgcagaacttagggtcggcatcgtttttctgcatatacaagagcttttttaagagcgccgtgacgaacaccgtttcatcgccgcgaaaaggcacgcagtagccgtgctcccccaccttttgcagatttttttgcaggtcgcccgcggggctgtcgatgctttgtaggtactgcggggtgatccacagcaccatgcgctcataggcggcgtgctcgtttgcgatgacggggcggtgcattttgccgacggggataatgagcagatcgccggggcaaaggtcgtagacctgatcttcaatataatacgtcacgctgccgtccaaaaagtaatagagctccaaaaaatcgtgcgcgtgaaactccatggtgcgaaaataggggtctcgattgtgtgaaagctgaaaatcttgccgcagcatttcgtcatttttacctgtttccacgtttttcaccctcttcctttggagaaatcatagcacagtttgcgccgatttgcaatatatgtgccgcaatatatcatttattttgcaattcatcgtgctatacttacagtagcagcggtggggaaactttgcctttttctgccgcccgaaaggagtttattcagatgcgaaacgatctgtttttgaaaagcgatgttgctaagaatttatatgacgcggtgcgcgacctgccaatcgtcgactaccactgccatctctcgccgaaggagattttggaggacagggaattcccggatattgcgcagatctggctgggcggcgaccactacaagtggcgtttgatgcgtgcctgcggcgtgccggaggcgctcatcacaggcgacgcggagccgcgcgagaagtttcgcgcgtgggcggcgtgcctcgagactgcgatgggcaacccgctttatgtgtggtcacacatggagctttcgatgttttttggcattgaagacacgctgacagcggaaagtgcggacgatatttttgaccgcgcgaacgcgtatatcaaagagcaccacctctccccgcgcaaactgatgctgcaaagccatgtggagcttgtggcgacaacggacgacccggcagattctttggaataccacaaggaaatcgcgaaggagaagaccttcccggtgcgcgtggtgccctcgttccgcacggacgcggcgctgaacatttgccgcgcgaactatcgcgactacgccttgcaccttggcgaagtgtgcggttttagtgtggagacgctcgacgacctgaaaacggcgctttcaaagcggcttgatttcttctgcgagaacggctgccgcgtgagcgatatcggcattgagggcttcccgaaggaagacaaaagctgcgacgccgcggagacgtttaaaaaggcgctgaagggaaagacaatcccggaaaacgagttccgcaatttcttatttgaaatgtatgtgtatttggcgcacgaatacaaggcgcataatgtgacgatgcagctgcacctgaacgtaaagcgcaacgcatgcacgcggctgtttgaggccgtgggtccggacgccggcggcgattgcgtgggcgacccgatcccggagcacgaagttgcagcgcttttggacgcgatggaccgcagggattcgctgccgcacacgatcttatacacgctggagccttcgatgtatatggcgcttgcgacgacggcgggcagctttaagggcgttgtgcccggcgcggcgtggtggttctgtgaccacaagcgcggcatggaggagcagctgaacattatggcggaaaccggccaccttgggcagtttaccggcatgctgacggacagccgcagcttcctttcctatgcgcgccacgattatttccgccgtgtgctgtgcaacagggttgcggaagagcttatggacggcacgttcctcagcgaaaaggcggcgttgaagctgttgaccgacctttgcgtggaaaacagccgcaagctattcggcgaataaaagtcacgttataataaggaggaatttcctatgaatattgtcattaccggcgcgggcggcgtgctttgcagcgctttttcccgcgcgcttgccgcagacgggcacaaaatcgcactgcttgacctcaacttggaggctgcggagcgcgaggcggagggtatccgcaaggcgggcggtgaggccattgccgtgcaggcgaatgtgctggacaaagagagcctgaaaaaagcgcatgacgttgtgctggaagaattcggcccgtgcgaggtgctcatcaacggtgcgggcggcaacaacccgaagggcaccacgacgagcgagtatttcagcaaagaagatatgctggacaaaaacgcgcggtcgttttttgaccttgaccaggacggcgtttcgttcgtgttcaacctgaactttctcggcacgctgctgacgacgcaggcctttgcgaccgacatgctggaaacaggcggctgcattgtgaatatctcctcgatgaacgcgtttacgccactgacgaagatcccggcgtacagcggtgccaaggcagcggtctcgaacttcacgcagtggctggcggtacactttgcaaactgcaacatccgcgtgaacgccattgcgccgggcttctttgcaacaaaccagaaccgcaccttgctctttaacgaggacggcagcctgaccccgcgcagccacaaaatcatctcgcagaccccgatgggccgcttcggcgagcctgaggagctgctcggcacactgcgcttcctcatcgacaatgacgcgtccggttttgtgaccggcatcacaatcccggtggacggcggtttctccgcgtactccggcgtataatctgacttttgggaggaatttttcatgatcatcggtgcacagggctttaccatccgcgactatgcgcagaacgaagccgactttagagagacggcgaaaaagctgcacgacatcggctacaagaccttgcaggtctctgcgtttggcgacattgacccgcatatcatccgcgagatttgcgatgaaaacgggctttccatcatcattacgcatacgaacccgcagctcattctggagaacaccgaaaaggtgattgagaaccaccgcattttcggtacgaaccacgtgggcatcggcatgatgccgcagaaatacacaggctctcttgaaggtatgcgtgcgtttttgaaggatttcggccccgctgccgacaagctgcacgacgcgggcatgaagctgcattaccacaaccacggctttgaatacgagaaatttgacagcaagtgcctcatcgaccacatggcggaggaaaccgacccggcaaaatggggctttattttggacgtttattggacgcagtatggtgggcgctcgccgcaggtgcagattgaaaaaatggcgggacgcattgacgtcattcactttaaggacatgaagatgcacggccacgagcagcgctttgcagccgtgatggacggcaacatggactttgtgtctattattgatgcatgcgaaaagacgggcattcaatatgcgatgatcgaacaggacaactgctacgaccgcagcccgtttgacgagctgaagctgagcgccgaaaacctgcttcgtgccggctgcacgttctaaggagggcatatgacacagtttacactttccgcgtttgcggacgaagcctcgccggagtttgaccggcagattgcagcgctgcaccgcaagcatattccgctgatggaaatccgcggcgtggacggcaagggcattttagacctgacagacgaggagcttgatgttgttgaaaagaagcttgcagcgggcaatatcagcatttccgccatcggctcgcccatcggcaagatcggcattgaggacgactttgcaccgcactttgagaaattcaagcgcgctgtggagattgcgaaaaagctgcacaccacgcgcattcgcatgttcagcttctatattccggagggcaaaaatccggagatttatcacgataccgtgatcgagcgaatacagaaaatggtggactatggcgaagcgcacggcgtgcactgctgccacgagaatgagaagggcatttacggcgacaagttagagtgcgtggagaagctgcacaaagccattccggcgctgcggtgcgtatttgaccccgcaaactacattcagtgcggcgatgacccggcgatgaacttcaaagcacttgcgccgatcatcgactatatgcacatcaaagacgcgctgttcaaggacggcagcgtggtgcctgcgggtgagggagacggctctgtgccgagtattttaaaaacgttggcggaaacgggtaagccgtacatgctgacattggagccgcatttgtacgatttcagcggcttgcagaatttacagggcgaggacgttctgcataagcgcgtatataaagacgcggacgaagcgtttgatgtggcttccgacgcactgcacgatattttgaaaaccatcggataacagaaagaaggtaattttatgagcgaaacagtaaaggtcggcattgtcggcatcggcaacatgggttcggcgcacgcaaagagcattttctccggcaatatcaagggtatggagcttgctgccgtgtgcgatattgcggaatcgaagcgcctttgggcggacgaaaatctgcccggcgtaccgtgctatgaagactacaaggaaatgatcgacagcggcgtgtgtgacacggtgatcgtggcgacaccgcattacttccactcccccattgcgatctatgcttttgaaaagggcaagaacgtgctgacggagaagcctgccggcgtttacacgaagcaggtagaggaaatgaatgcggccgcgaaaaaatccggcaaggtgttcggcatcatgtacaatcagcgcacgaacccgaagttccagaaaatgcgcgagattgtgcagagcggcgagctgggcgaactgaaacgttgcatttggatcattacgaactggtaccgcacgcaggcatactacgacagcggcacgtggcgtgcgacgtgggcaggcgaaggcggcggcgtgctgctgaaccagtgcccgcatcagcttgacttgtggcagtggatcttcggcatgccgaaccgcgtgatgggccactgcaagtacggccattggcacaacattgaggttgaggacgaagtgacggcttacgccgagtacccgaacggtgcgacgggcgcgttcatcaccacgacgggtgagtgcccgggcacgaaccgtttggagattacaggcgacaaaggcaagcttgtttgggaagaaggcaagctgacctggtggaagctcgccgtgccggagcgcgaattctgcgtgacgtgcaaagagggctttgcgcaacccgaaatgaccgtgaccgaagtggaaacggacaacattgagcttgggcataacggcattctgcagaacttcacaaacgctattctgtacggcgaagagctgctggcgccgggctatgagggcattaacggcctgaatatctcgaacgccattcacctttccgactggacgggcaagccgcaggatgtgccggtagacggcgagctgttcctgaaatatttaaacgagcacagagcgacctcacacgtgaaggaagagaaagaagacagcggcaagattgcagacctttccggcacgtataacgaccgctggaaggtaagataagctgaatgacttgtcgttcagctatggttttgtgctttcgatgattgaaaatcatcgatttcactgcgcgaaaccaacccaagaaccatttgacggtaaacgcggttaaaagtttcgtccaccttttcaaaggtggtggtttccaaaggcaacgcctttggtcgagcttcgcagagcttgaaatccttttgcctacacaaagactaagatgaaaaagcacgcagattgaatttgtctgcgtgcttttgttttgaatgtgggatttccgtacagcttaaaattatccgtgcataaaaacaatatgcaaaagcgccgcttccgggatgaaccgaaagcggcgctttctatgcgttaaatcttacgatttaagttttgattaagccttggtgcgctcttcgaggccgttgagctcgtctctgagctcctgcgggagcttgtcgccgaacttcttgtagaattcctctacgccggcagcttccttagcccacttagcgttatcaaccttgaggatggaagcgagcttctcctcatcgaagtccttgaggccttcgaggttgatgtcttccggcttcggaacgtagccgattgccgtctcaacagcgtcaacttcgttatcgcagcgcttgaggatccactcgagaacacggaggttgtcaccgaagcccggccaaatgaagtggccgtcttcgtcgacacggaaccagttgacgttgaagatcttcggagccttgtcgccgagcatctcgcccatttcgatccagtgcttgaagtagtcgcccatgttgtagccgcagaacgggagcatagccatcgggtcacgacggacaacgccgactgcacctgcagcagctgcggtggtctcggagccggtgatggaaccgatgaagacaccgttgttccagcttctggactggtaaaccagcgggaccgtatccggacggcggccgccgaagacgatagcggagaccggaacaccctgcgggttctcaaactcgctggagaggcacgggcagttagcggtaggagcggtgaagcggctgttcggatgagccagcttgttgccggcagcaacatactcggggccgtttaccttagcgcccttccactcttctgcgttaaccggcgggttcttgtcgaggctctcccaccaaacggtgttgtcgtcgaggttacgcgcaacgttggtgaagatggtgcccttctgggtggagataagagcgttcgggttggacttcatgttcgtgccgggagcgacgccgaagaagccgttttccgggttgatggcatacagtctgccatccgggcccttacgcatccaagcgatgtcgtcgccgacggtccaaaccttgtagccctttgcacggtagccttccggcggaatcatcatagccaggttggtcttgccgcaagcagacgggaatgcagcgcaaacgtacttaacctcgcccttcgggttctcaacgccgaggatgagcatgtgctctgccatccagccttcgttcttagcctgataggaagcgatacgcagagcgaagcacttcttgccgagcagaacgttgccgccgtaagcggagtttacggagatgatggtgttgtcttccgggaactggcagatccagcgcttctccgggtcaacgtcgcacttgcagtgcagaccgcgaacccagtcgttgctgtcgccgagaacgtccatgaccttctgaccgactctggtcatgatggacatgttgagaacaacatagatggagtctgtcagctcaacgccgatcttagcgagcggggaaccgaccgggcccatggagtacgggataacgtacatggtacggcccttgtagctgccacgagcaatatcgtacagcatcttgtatgcttcctgcggctctttccaatggttggtcgggcctgcgtcctcttcttttctggagcagatgagggttctgtcctcaacacgggcaacatcattcggagctgttctgtgatagtagcagcccgggagcttttcctgattcagcttgatcatttcgccggactcaaccgcttccttgcggagctcttcgagctgctcttcggagccgtcgatccaaacaacctgatccggattgacaagagctttcatctcgtcgatccaagcaagaattgtcttgttgttagtcattgttatttctcctttcgccaaaaaggcaaataaaatgtaaaataacccatttgtctttattctaccacaagttccccgcataatcaattacaaaatcatgaattccccccatcttttttcgatatagcggtattgatttagcgcatatcagaggaaatttgcggagttttttaataatcgagctgtaaaagcgttacgcgtccgtttcggcgggtggcattcatatcgataagacgctggttttcgctgccgcgaaaaagcagctcaagattgcgctgctgttcgatatacggcccgtccaccagaacgtcgcacgcgtttaaaagcgcgtccacatcggggttgtgcatagaaacaagctgctcatatgtccagccggaataggcggtaacgtctttatgcagggcgtgcacctgctttgcgagcgctaaaagcggctttggctggcagaacggctcaccgcccgaaaacgtgatgccgcgcagcagcggattttttttgaacatgtcaaagatgacatcggtgtcttccaccctgcctcccgcaaaatcatgcgtttgggggttatggcagccgggacagtggtgcggacagccctgtgtgaacacggtaaggcggatgccgcgcccgtccacgattgaatcgttcacgatgccggaaatgcggatttccattttgccgtgccttacaggctgtgctttacgcggtcgtgttcttcggcgcgtttggcgtcgttccagcggtcggtggtgccgacaaggtagcctgtgatgcggcggatgcggtcgaacccgcggccttcgccgacgatgatggtttttgtagttttctgcgttttgggtgacatgataactgcctcgattctttttataaatacatttttacattcatttcaatttttctaaaggcggcggatgccgtcttttaggtggttcttgggctggtttcgcgcagcgaaattgatgattttcaatcatcaaaagcacaaaaccatagctgaacgacttgtcgttaaggttaaacccatgtgttgccgtttttgcttttatgaacttgcggttcaagttcattgggagcccccctaattgggtctcccatacttcaacagtccaccagactgttgaagttcccgtcctgatttttggtaggcaaatagatttcgctttctgcggaaagcgactcggggcttcgtcccaagaccccaccgcctttgaaaaggcgggcgaaacttttaatcaccgttgacggtaactttgctctatcgaatcaaatgcgaataatccgggacgtcgtggtagcgctttttcagctccagaagcctttcgagcggaacgccttcgccctctcttctgccgcacctcgggcacacctcgtcgatgatgccgttatacccgcacacagggtctctgtctacggggtgattgaccgagccatagccgatgcccatttctttcatgcagcgcacgatgctttcaaatgcgtcgatgtttttgcacgtatcgccgtcgagctccacgtagctgatatgccccgcattcgtgagcgcgtgaaacggcgcttctctgcgaatcttttcataggcgctgatggggtaatacaccggcacgtggaacgagtttgtgtaatactctctgtccgtaacgccgggaattttgccgtatttcttttggtctatgcgcacaaagcggccggaaagcccctctgcgggcgttgcgagcaaggtgaagttgaggccggtctcacggcttttttcgtccattttctcccgcatatgggagatgatctcaagccccagcttccagctttcttcgctttcgccgtggtgcttaccggtgagggcttttaaggtctcggcaaggccgatgaagccgacacttaaggtgccgtgctttaagacttcggcgacggaatcgttgcggtcgagcttttcggaatcgatccacacgccctgccccatgagaaacggataattatacacctttttgctgcactggattttgaagcggtgcagaagctgttcttccacgagcgcgattttttcatcgagcagcttatagaacgttttcatatcgcccttcgcttcaatgccgatgcgcggcaggttgatggaggtgaagctcaaattgcctctgccgcaggtaacttcctttgtattatcgaatacattgcccatgacgcgcgtacggcagcccatgtacgccacctcgctgttataatcgccgggcttatagtattgcaggttgaacggggcgtccaaaaagctgaaattcgggaacaggcgcttggcggagcagcgcagcgcgtggcggaacaggtcatagttcgggtcgccctcgttgtagttgacgccctccttgactttgaaaatttgaaccgggaaaatgggtgtttcgccgtcgccgagccccgcttccgtagcgcggagcaggttgtgcacggccattctgccctccggagaagtatccgtgccgtagtttaaggagctgaacggtacctgtgcgccggcgcgggaattcatggtgtttaaattgtggacgagcgcttccatggcctgatacgtggtagcatccgtctctttgtaggcggtctttgcggcgtattccgcggcggcgcgggcagcgtcgcccgtgatgatctggaagccgttttctgcttgatggcgcggcagaaacgcgcgcagcttttcggcgtaagcttctgcggtgtgcattgtgacatcggtgccgagcgcttctttgatggcagccgtcagcgcggcggcatcggaggcgctcatatcaaaccgcacctcaatatactgcgcaagcgcacggaaatactgcttgcggtatgttttcttcacgccctccgccatagcgtagtcgaaattcggcacgctttggccgccgtgcatctcgttttggtttgcctgaatggcgatgcacgcgagcgcggcgtagctgcggatgtcgttcggctctctcaaatagccgtggcctgtggaaaatccgtcttgaaacagctttaaaaggtcaatctgacagcatgtttcggtgagggcgtaaaagtctttatcgtgaatgtggatgtcgccgctcgcgtgcgctttggcaatctccggcgggatgacgtatttatcgtaaaacgccttggcgctttcggagccgtatttcagcatggtgcccatggcggtatcggcgttgatattcgcgttttcgcgctttaagtcatcctcttcggacgggcggaacgtgaggttttcaaaaatcttcacgagctcgtcgtccatttcgcgcaggtgctcgtgctccgtgcgataattgatgtaagcgttcgccgttttggcgtaatcggcggcaagaagcttttcctccaccacgttttgaatttcctgcgccgtgggcgtacccggcagcttttcgagcgccgtgagcacctcttcggtcaattcgttcagatcggcgtcgctcatacgctctgcggcgattctggtattggccttaaaaatggcgcttttgattttccgcgcatcgaacgacaccttgtccccgctgcgcttgacaatatatcgaatcatacgtttaacttccctttccgtttctcccctacggcaaagcctaaaaaccttcgctttgcgctttctgtactttcgattataggcgcttttcctatacatgtcaagggcatatttagtgtcaaaaccactatatatagtatcaagtttacataataataacaaaatataccgcgcgtcatagaaacggttttttccataacacgcggtataacttgtgatttcatggcgttttttcacggtttttggggcacatttcggcgcggttgcacaccgtctatacccgtttataagccctatgcacgccatacggcggttgacaaaataaaacacgttttttcacgaaattttttgccggttttttagttgacgacggcaccgagcagccccgcaagatacaccgcgccctccaaatcgatctttgctttctgcatttttgcaaagcggatatcggtgcgcgaaaatttggcacggcgcaggtcgcattctttcagctgcgcattgcggaacacggtctccgtaaggtcacagccggaaagatcggctttttcgaggtccgcttccgcaaagctcgtaccgcgcagactgatgccggaaaagtcctgctttttgagcggacaatgatcgagcacacagtattcgagtgtgccgccgcgcacggcccagccggtgaggtctgcgcccgcaaaggagcagcccgagacacggcaattctcaaacgcggtgacaaacaggcttgcgcccgaaaacgtgcagttttcaaacgaacagccgcgcgccaaaacgtcgtttaagcgggcaaaatcgaacgcgcacgcggaaaagcggcatttttcaagcaaagcgccggaaaacatcgcgccgcgcaggtcgcaattttcaaacgtatagccgcgcagctcggcatccgtgaaatcggtatcgccgagccgcgcgtttttatacgtgttctgttctaaagagaacattactcttcttccgtcacggcgatgtgcagctctttgagctgtgcctcggtgactttggacggtgcgtccatcatgacatcctgtgcgctcttgttcatcgggaacgcgatgacctcgcggatggattcttcgccggagagcagcataaccatgcggtctacgcccggggcgatgccggcgtgcggcggcgctccgtagcagaacgcgttgtacatggccgggaacttcgcctttacgtcgtcttcgccgaggcgtaccatctcgaacgccttgaccatgatctccgggtcatggttacgcacagcaccggaggagagctctacgccgttgcaaacgaggtcgtactggtctgccagaatgtcgagcgggtcaatctcgccgcgctcggccttaagcagcgtttccataccgccggagggcatggagaacgggttgtggcagaactccagctcgccggattcctcgccgatctcgtacatggggaaatcgacgatccagcagaactcgtagcgctctttatccatgtggccctcgcacgccgcgccgagcatacgacgcatgacgcctgcggtcttctgggcctcctcacgcttgcctgcggagaggaacacgagcgtattcggctcgagagacagcgcggatttgacggcttccacggtcttttcatccgcattgataaactttgcgatgccgccggcaatggcgccggattcatcgaccttgaaccagtacggcttctggccggcctgcacctctacgtctgcgcagagcttatcgactgccttgcgggcaagcttgcagtttgagaccgggacagccttgacggtgttgttttcaaacgggccgaagccgcagcttgcaagaatatccgtaacgtccttgacgcgcaggtcgatgcgcaggtccggcttatcggaaccgaactcctccatggcctgacggtacgggatacgggcaaacggtgcggaggacgcgatgttatacgtgccgtactttgcaaaaatcggcggaagaacgtcttcgatgacggcaaaaacgtcttcctgcgaggcgaacgccatttccatatccatctggtagaattcgcccggagaacggtcgccgcgcgcatcttcgtcgcggaagcacggtgcgatctggaagtagcggtcaaagcccgcggtcatgaggagctgcttaaattgctgcggcgcctgcggcagggcgtagaacttgcccgggtgcttacgcgccgggacgaggtaatcgcgcgcgccctccggcgaagaagccgtgagaatcggcgtggtaatctctaaaaagccgtgctccgtcatagcggtgcgcagagcggaaacaacgttgcagcgcaggatgatgttggctttcacttccggattacgcaggtcgagatagcggtattttaaacgctggctctcgtccgcttcgcgggagtggttgatctcgaacggcagctcgttataacggcagcggccgagcacggtgatctccgtcggcgcgatctcgatgtcgccggtgggaagcttcgggtttttgctggtgcgctcgcgcacgatgcccgtaacggaaatcgtggattccttattgaggggctttacaatgttcatcatctcttcgttttcgatgacaacctgcgtggtgccgtagaaatcgcgcagcaccaaaaacgcaaagttattgccgacttcgcggatgttttccatccagccgaccagtgtgacggtctcgcctgcgtttgcaaggcggagctcgccgcaggtatgggttctcgattgtgtcatgattgatttcctctttcgttagtgtgaccggttaaaatgtgatgggcatggcgtcttcctgttcggtgacggccgtgatgtacgtatcaacaaagtcatcgttgagggagatcttcttcttttcgcccgtcttcatgtttttgagcacggcttcgccgtttgcgatctcatcgtcgccgaggacgatgctgtactgcgcgccgattttgtcggcgtatttcatctgggctttcagaccgcgtgcacacaggtcgcagtctgccgcgatgccgcagctgtgcattttttcggtgagctggaacgccttcatctgcgccgcttcgcccagagacgcgatgtagacctcgcactttgagtcatttccgaagtctgcgcccatctcgttcatcgccatcagaatgcggtcaagaccgagcgcgaagccgagcgccggtgtgggcttgccgccgacttcctccacgaggccgtcgtagcgtccgccgccgccgagcgcgaagccaaagcgcttcgagggaaactcaaacacggtgcgggtgtagtaatcaaggccgcggacaaggccgggatcgatggaaaacggaatattgatagatttcagcagcgtctgcaccttttcaaagtgcgcacggcagtcgtcgcagagataatccgtgatcttcggcgcacccttggcaatctcgccgcaaacggggcttttgcagtccagaatacgcatggggttgcgctccaagcgggaattgcaggtctcgcagagctgatccttatagccctcgaaatacgttctcagcgcctttctgtactctgcgcggcaggtggggcagccgatggagttgatggaaacctcaatgtcatcggcaaggccgagacgattgaaaatggacatggccatagcgatgacctgtgcgtccgctgccggttctgcggtgccgaacatctccacgccgaactgatgcagctcgcgcagacggcctgcctgcggcttttcgtagcggtagcaggaggtcttatagtagagctttaccgggtaaccgccgttatacaggccgttttccagcatggcgcgcacggcgcccgccgtgccctccgggcgcagcgtaatggagcggccgcccttatcttcaaacgtgtacatctgcttttccaccacgtcggtggtgtcgccgacggagcgcaggaaaagctcggtgtgctcaaacaccggggtgcggatctcggaaaaaccgttcagttccgcttcatccgtcataacggcttccacaagcgaccatttttcggattcacccggaatgatatccacggtgcccttaggcgcttttgtgatcaattccataaaatatccctctcattcatgaaaaataaaaaagcccttacccaaaacggataagggacgaaacaggttcgtggtgccaccctttttcgggagaaaaagcgaaagcttcccctcccctttctttccttaacgcggaaaacgcactttcgtgcggctcacgggtgtctttctctgccggatgcacgcgccgctctcagcatttgcggcgctctctgttttgtgccccatggcagatactcttcccggtcaatgccggtgtattttcaaagcatacgctttggttttaaatctacagctttacaatctcgcgccaatcgaggtcgccgcgctcgagaccatggatgagcacctctgccgttgcgatgttcgtcgccacgggaatgttattcaggtcgcagagacggagcaggtttttatcgtgcggctccagtgcctgcttctgcatgggatcgcggaagtacagcaaaaggtcgatctcgttgcaggagatacgcgccgcaatctgctgatcgccgccctgtgggccgcttaaaaagcggtggaccgaaagaccggttgcttcctctacaagcttaccggtggtgccggtcgcacagagattatgccggctcaggatgccgcagtaagcgatgcagaactgtaccataagctctttttttgcgtcatgcgccgtaagcgcgatattcatgaaaattcctccctgtttataatcattcagcccctatcccaaatgtcacaacgataagggaaccgaaacaccgttcatgcgtgccgctatgcgggaaagcgccgtcatgccgggcaggtcatccgccggcacgcagccacgctgaaaagcagccgtcatttgtctatcttcgggtacgatgccgatgagccgcacgccgctttggtcgatgacgtcatcgaggtcgcgcaggccgccggcatcttcccgcccggcggaaagactgccgaaatattcggcgttaaagcgattgatgacgagccgctgctgcggtacctcaagctctgttaaaagcctgcgcacaatggacgcatcgcgaatacacacaggatccgagttgcacacaataagcgcgcagtccgccgccgctgccgccgcgcggaagccacgccccacgcccgcgggagaatcaaggatcacgcggtcaaaatagcgctttaaaagcggaacgagtctaagcatgacgcgttccggcacaagatcttcgccgcttgccggggcaggcattaaagacacgccgggcatggtcacgcacgggtaaatcgcatccgcaggcgcgcagcgccctgccacaacgtccgaactgtcgaacacgagcgcttcctctgtgccggtcatacggtccagactgcgcaggcccgcgtcacaatccaaaagcagaacgcgttcgccgcccgccgcaaactgagaagccagcccaagcgaaacggtggactttcccacgccgccttttcccgatgtgacaacaatagcagtacccatagataatacctcattaaacataataacacaaaaatgcacggtagtcaaaagtaaaaatggctataccgcaattttatcacagcgagacaaaaacacggcggcttttttgtcgaagcagacaaatatcctccctaagcacgcgtcattccgcaccctctgttaccgtggtttctgcgttttttgcctccttttggagcgtttcggcaaaacaagcttcaaaaacggcctttgccgtctcttttgcggcatcgcccttgccaccgtattcgatgacgaccgccacggcaatctccgggttctcgtacggcgcaaagccgatgaacgtcaggttatcggaatggtcggcgttttccgccgtgccggtcttgcccgcaacggcaatgccgaaatccgaaaaggtcgaggccgccgtgccctctgtgcacacctgccgcatgccctcgcgcacgaccttgaaatattcgtcttcgatctccgcttttaacacgacctccggctctgcggtctctttttccaccgcgcggtcgtagtccgtgactttatttaagaaatgcgttttgtagcgcgtgccgccgtttgcgatcatggcgcagtattccgcaagctcgatcggcgtgaacatatcgtcgcactggccgatggccgcctgaatggtgaggccgtcataccaatttgcgccgtggcgctccgtatacgttttggggtcggacatgatgcccgcagtctcgttcaattcgcacccggtcttttctccgagagcgaacagctctgcatacgtgtgcattttgtggatggtcagcatgcggcccacgtcaaagaaaaacgcgttgcaggagttgcggatggcgccgtacacatccacctcgccgtgcacgccgaggcagcccggttcgtaatccggcgcataatagtggtacgcgccgtcgcagttcacggggtgcgaggtcggcgtgatgacaccttcctccagcgccgccaaggcgacaaggggcttaaaaatggaacccggcgtaaagatgccgtttaatgcgcggttgaaaagcggctggctttcgtccgcataaagctgcgtcaaatacgcatcgtccgtattgtacttttcaaggtcgaaattcgggtaggtcgcgctggcgatgatgccgccggtgttcacgtccaaggcgacaaccgcaccggcctcgcagtcttcggtcggcttcgcttcgatctgctcggcgagcgcgtttacggccgcgcgctgcacattgctgtctatggtaagccacacggaatcgcccgcttccggcggctccgtcacggtggtggaggtcactttgccggtagcatccgttgtgacgctctctttgccatttttgccgcgcagggtggactcgaacacgctctcaatgccgctttggccgacggtatccgtataggaatagccggaaacgtttgaggcagaatacgtgttgcccgcttcctcggcggcatcgtactgctcctgcgaaatggcacccagcgtgccgacgatatgcggggccaaatcgccctccgggtattcgcgtgtctgctccacctgcgtttcaatgcccggcaaatctgtgctgcgctcacttaagagctccaccgtttcgatggaaatgtcttttgcgagcacgaacgggttcgtgcggctgaaatacgcgcgctccatgccgtagcgcacggacgcgatgcggcggatgtcttcggggcttgtataggtttcgaggtcataccgctcgatgagcgattccatgcactcgtctgccgtggcgctcgagggtaagtctaagatgtcttcgcttttcagcgtttcgatctcggcggtcattttggttttaaactgatatttgcccgatttgatttcgatgggaaggcgatccgtccacgggacgttcagcgtttcgagcagctttacagcctccaaaacgacggcattgcgcgtttcattgctgccggaaagacgactgtatatggcattatacacggagcggttgcctgcgagcacgtttccgttacagtccaaaatttcgccgcgcgtgccggtgagctttaagtacgtcgcggaggactgtacggcctcctcttcaaacgtgccgccctctaaaagctgccactgggcaagccgcccgatatacaaaagaaagacggcagcaagcataacgccgcagaaaatatagcggccgcgtccttttttcacagctgtcgtctcccttcgttgaaaacttaaattctttgcagcttatgcagctttgacctgcgccgccgtatggcgctgcgcacgcggggctttctcacccacgcctgcaaaccgtagcacacgggtatcgttaaaagcgtgtaaaaatagatgggcagatactttgtgacgagcgcgtacagcgtcagtgaatactcggctgcaacgtacagcacgagccaatcgagcaaaacggcgacggcacagctccacagacccatcaataccgatgtgaaaagctgaatttgaattctggtaccgcacaggccgctcagcaaaaagcacagcacgccaaacgtgagcgcgtgatacccgaacacagccccgctgccgatatcggcaagaaacccggcgtacatgccgaacgccatagcgggtgtgcacgcctccaccatggcaatggtgagcgcggcggaaagcaccggaagcggttttacgcccatgatctgcggcagcagccccggtgtatcctgtaacaggaacagcagcaggatctcaaccgcatacaagacatagcgtatccattttttgcggttcggcacagctgttcactccttttattcatttcccttgcttgcggtctgcgcggggtcttcttcatctttgttattcgtttccggcaagccggttgtaacgtcgcccttgccgtcgaaatccgtcacgacgaagacatccgtcacctctgttacgtccacgtatggagtcaaaatggcatagtacgaggaatccgcgttgctgcgctccacactgtccacacgcccgatgagcaaatcgcccgggaacacgccgcccgcgccgctcgtggtaatgatggagcccggctgcacctcggtatctcttgtaaggtacagcattttcaccttgccgctgtttgcgaactggatgtcgcttgtaacgacgccgctttccttgcatgatttatccgtggcgccgatctgcgtcttttcggataaaatcgaccgcacgcggcttgacgcggcgtagacctcctccacaacacctacgacgcccgtttccgtgatgacggcatcgccgacggacacgcccgcaaggctgccgcagttgatggtgaaatcaccgaacacgtcgttcgggtcgcgccctacgacgctccctgcggctaattgcaggtcgggcatggcttttttgacggagaggatattttcatacgaagcattctcgtcttttaaggtgtagtaatccacaagctgttcgcgcagcttccggttttcctccgaaaggtcgttgtacagcgctttaagctcctctttggacatgccgtccaaatttaaaaactcctttgcgccctcggtagtattcgtccccgccgtgagcagcggtgcggataccgtgccgaacacgtttgagaacacggatgttccggcgtttaagccgtacacgagcacgccgagcagaacgacaaccgcgatcattaaaattttaaaatttttagaggtgaatttctccatgcgccgcacctgcctttcgatttttaatttaaagtcaaattcaatttatttttctgcagcttttaccgcgccgcgcgcgtttgcggggatatgcgctttgccctctaatgtgcggcctgcaccctcggctacgcagtcgagcgggcgctccgcgacctgcacgggcaggcccgtcgcttcatgcaaaaagcggtctaagccacgcagcagtgcaccgccgcccgtgagcgtgagacccatatccaaaagatctgcggaaagctccggcggagtccgctccaaaacgcggtgtacggactcgaacacagctttcagcggcaccaaaagcgcctcgcacacgtcttctgctgtgacggtaatatttttcggctggccgtccgccgcgctgcgaccgcgcacctccatggagacactgccgagttcctcaagcgggtaagcggagccgatctgcaatttcacgtcctccgcagtgcgttcgccgatgagcacaccgtactttttgcgcaagtacgaaacgatagctgcgtcaaatttatcgcctgccacacggacggaatctgccacgatggggtcgccgtaggagatgaccgccgtttcgcttgtgccgccgccgatgtccagaaccatgctcgcaaccggctcgcccgtgggcagccctgcgccgatagccgccgcaaccggctccaaaatgagctccacgcggcttgcacccgcctgctttgcggcgtcctccaccgcacggcgctccacctccgtaacgccggagggaatgcagatgacgatgtgcgggcgcgtgaacgaaccggccttgatggccttgcgcacaaagtatttgagcatggctgccgtcacctcaaaatccgcaatgacgccgtcttttaacgggcgcaccgccgtgatggactccggcgtgcggccgagcatttctttggcctttttgccgatggctaaaacctcgttggagttcgcgtccaccgccaccacggacggctcgcgcagcacgatgccctcaccgcgcacataaacgagcgtgttggccgtgccgaggtcgatgccgatgtctttaatagatgttgaaaaaagagaaaaaagcgaggaaagacccgccatgatcgtagattgcagagaacccataggataaaacctcccgaaacgggtaaaactttggcaagccgcacgtctttgcggcgcacggtactcatacttattcagtataacaaaacagcggcggagcttcaaccgaaaaatcgtgaacaccgccgcaatttgaaaatttattttgtccccgtgcttccgaatccacccgcaccgcggtcagtctccgttagagatgtgacctcctcaatcaccggcgcgaaatacggcataataatcatttgcgcaatgcgctcgcccggctgcaccgtgtacggctccgcgctgagattgtgcaggccgatctggatttcaccgcggtaatcgctgtcgatgacaccgacaccgttcgtgacatgaatgccctttttgatgccgagaccgctgcgcgtgaaaacgaagcccgccgtgcccgcggggatctccgccgcaagaccgctcggaaatacgcagcgctcgcccggctcgatcgtctgcggggcgtccatacacgcgcacaggtcatagcccgcactgcccgccgtcgcctgcttcgggatgatcgcaccctcgcgcacacgcatcagttttaaaaccatattttgttccattttttgctccttgtctatatacagtatcccaaaaattcccgtttttcacactttttcccggttttccctcattgtggataactgtttccacagcgctgtggaaaataaaaaacggcttatttctgcggtttttttgagttcacagtctgttcaaaaagaaagttctaaacactttccaccgagttttccacaatcaaagcacgccgcggaggaaaagtcctcgggtgcagtcggaacgcggcttttcatgacgaacggcagcgtctaaaatcgcctgcgtttccacggcgttttccacagagaagcgcaaaacaccgaaatcgacattcgaaacggggcggtcaaagagcacgagcggcacgctgttaaagacctcggaatacacggttttaccctcaaaacgcgtgcagtgcacgggaaattccacgcccttgcggtcgcggattttgcccgcatgcttgcagtttaagcagcccttcggcgaatttgcaagcggacagttgcgcgtgagcatcaggggctgacggccgtagagcaaaatgccgcgcggcagctcgccgccgaggccgcgaatttcgtcgccggtcagttcaaaggaaagctcggtatcgtctaagccgaattcttcaaaaaagcgcaggcattccgtattgaatacattgagcgaaaatccgccgtgtgcggacacaccaagctccttgcacagggcgagcgcaccgagattgccgcagtaaaagtgcgtatcgcccatggctttgcacgctttcatgcgtgcgcgtaccgcgttttcgatgccccacagcgcgcgcggcagggcaagaattacctcaacacccgcgtttttgcagcgcgtgcgcgtcgcttcgtcggcgtcgagcggcagaatgaccgcttccagcatggaaatgttttccggcacctgcgcgcagtctttgaagaacgcgcgaagtttaggtcggccgctttcaccatgtgtacgcgtatcgagcggaatatctttaaacgatacggcgggcttttcgcggcgctgttcgccgagcttttccagcgcttcacggcgcagaccgttcaaaacggaaatgggcaatgcggttttttcatcggtatcaatttgcaccgctgcgcacaaatacggcgtgccgccggttttttttaactgctgctcccagcgttcggtgttgacgggcagcttctgcgccgtttcgcatacgcagtcttctgccgtgacgaccgcttcgttttcgccgtccgagactgtgacgcgcgggttttcgcccgcaaaggcgcttaatgtgaatgtcaccggcacacgctgcgcttcgtttttatataaagtatgcagctgcgcgaacacggcggaatttgcgctctccacgtcttcctttgtgcgggtgccgaacatggtacgtcctctgtgtgcggacagatagccatccgtaaagccggagcgcgagaacaccgcgtttaaatgttcgagcaggttttccggcacagactcgccgtctgccgcttttcggcacgccgcgactgccgccgccacgtattccggccgcttcatgcgaccctcgatctttgcggaacatacgccggcgttgtgcagcgtttcgatgtggtcgatgaacgacatgtcctttaaactgaggtcgtgccccgtgccaccgggcgcggcaaacggcagacggcaggtttgagcacagcgcccacggttgccgctacggccgccgagcatggcgctgaaatagcactggccggaaagcgacatgcacagcgcaccgtgcacgaaagcttcaagctccacatcggtcttttttgagacttcttcgatttctttcaaagacatctcacgcgccaaaacgacgcgggacgcaccgagtttctttaatagcgccgcgccgccgggcgtgtgcaggctcatctgggtagaggcgtgcaaaggcatctcggggcaggcttcgcgcagaatattaaacagacccatgtcctggatcaaaatgccgtctacgggaacagaacacaggaacttgcagaaatcaagcgcttcgggaagttcgtcatcttttaaaagcgtgttaaccgtgacgtacacgcgcacattgcgctcgcgggcaaaaagcaccgcttcccgcatttcttcacgcgaaaaattcaccgccgatgccctggcggaaaacagcgagccgcccatgtacacggcatccgcaccggcgaacaccgccgctttcagggccgcgggattacctgcgggcgcgagcacctcaatcttcttcgtcttcacgcgcggtctcctttacgtctgccttttcaaaaaagctcacaagccccgtttcgtcgccgtaatcgggcagcatggggttgcgcaggtcgatgggcggcaggtcgagcggttctgcagctgccgtgtgcgctgcgttttgggcagcggctttcgcttcttccgcttccttttccgcagcttcggcgcggttttcggcaaggcgcagcttttcctgcaaaacgccgagcttcatttccgcttcggaaaggcgggccttcaggccgtccgcaccggcaaattcctttgtcttggtgcgcagggcatccgcttcctcgcgggcctgattcaaagcggcctccgtgcgggaaagctcctcgctcaggttcatggccgcaatgaccgccgctttctctatggttgcgccgtaggcgttgtttaaaacctcttccatgcgcacgcgcacacgctctgcgatggcttctgcaccgtcgcggtccacatcgccggaaacggtgacgtccacgccgcagatattcagtttgaatctcgttttttccattgcacagattcctttccccgcgccgattttacgcaggttatactctgttctgcattatataccaaaagccccgccttgtcaaaaaaagcgcgcaagacgggcgtttcggcggttttctgcaaaatctgcacggattttacacaaatgtacttgtaacacgctgttttcccctatataatggtatacggtgtgtgtaaggccgaaaaaagacaggcgcactgcggttttcggccggtttataccgaaagccgatattttctgtcgaaactatacaaagccaccgctttaatttctgcttatgcccgctattggtcttgaatttttcatgattttagtatataatgggtataaaccatttgttttttaagtaaaacgcatttaattttgtgcatataacacaaatctggcgtgtttttcacgcataacacatggaggacaaagaatgaattacaagatgacccccgcgcaggtcaagagcgcaatccgtgagaagctctcgcacatttacggcgtttccgcagagaacgcttccgacgatgaattctacaaagcatccgcacttgtggtgcgcgacctgctcgttcgcggccgcaatgagttcgtacacgaagctgaaaagcaggagacaaagcagatctactacctgtgcatggagttcctgctgggccgctccctgaagaacaacctgtttaacctcggtcttgaggacagcttccgcaaagcgctttccgaaatgggcgtaaagctcgataacctttacgagcaggagccggacgccggccttggcaacggcggcctcggccgtcttgccgcctgcttccttgacggccttgcaacacagggctacccggccatgggctattccctgcgctatgaatacggtattttccgccagaagctcgttgagggttggcagacggagctgccggacttctggcttccgggcggcgaggtctggatgcagaaggtcgacgaaagcgccattgaggtgcacttcgacggctacattgaagagcagtggcacgaccactaccattccgtacgccataaggactataaccccgttatggcgattccgtacgatttgtatgtttccggcatggacggcaagggcatttctgtgctgcgcatctggcgtgcggaagccaacgaatttgatatgaagctcttcaacagcggcaactatatgcgtgctatggagcagaaggctatggcagagaccattacaaaggttctctacccggaagacaaccactacgagggcaagagcctgcgccttgcacagcagtacttcctcgtttccgcctccgtacaggacatcgtacgccgccacctgtacacgcatagctcccttgatgatctgccgaaacttgcggcgatccacctcaatgacacgcaccccgtgctcgccatcccggagctcatgcgcatcatgctcgacgaatgcggctacgagtgggacgcagcctgggacattgtgacccgcaccattgcgtacacgaaccacaccgttatgagcgaggcgcttgagtgctggagcgcagacctgttcaaatcccgtctgccgcgtatttaccagattgtggaagagatcaaccgccgcttctggattgagatgcgtgcaaaaggcgtggacgaaggcaagatctggcgcatggccccgctgaacgacggctatgtacgcatggcaaaccttgccgtatacgcaacacacagcacgaacggcgtttccgcgctgcacagcgaaattttgaaggacagcgtgttccacgacttctacaccgagtggccgaataaatttaagaacgtcacaaacggcattgcacatcgccgctggctgaaccagtcgaacccggagcttgcttcccttatcaccgagttgacgggcgacggcttcatccacgatgctgctcagcttgagaagctgatgaaatataaggacgatacctccgtgcagaagaagcttgccgagatcaagctgcacaacaagcagcgccttgccgagcacgttaagcgcacgcagggccagatcgttgacccaaacagcattttcgacgtacaggtcaagcgtctgcacgagtacaagcgccagcacatgaatgcgctgcatattctttccgtataccagtggttgctcgaaaacccgaacgcggattataccccgcacacgttcttcttcggcgcaaaggcagccccgggctactatttcgcaaaggaaattctccagttcatcgtctgccttgccgataccatcaacaacgacccgcgcgtcaaccagaagctgcgcgtcatctttgttgaaaactactgcgtatcctgggcagagctgctcaccccggcggcggagatcagcgaacagatctcccttgcgggtacagaggcttccggcacctccaacatgaagtttatgatcaacggcgccatcaccctcggcacgctggacggcgcgaacgtggaaattcacgacgcagtgggcgacgacaacatcatcctcttcggcatgacgacgcccgaggtcaacagcctgcgcgcttccggctacaacccgagaaaccagtacgagcacaacaacatcatccgcaaggcgatggatgctctcggccagggctttaacggcaagacgttccagaacctgcaccaggcactcctcaacgtcgaccagtacatggcgcttgcagactttgcttcttacagccatgcacagcaaaaagccgaacagctttataaggaccagaccaagtggaactctatgtcccttgtcaacaccgcaaaggcaggtattttcgctgccgaccgcgccatccgcgattatgcgaacaccatttggctcgcaaagccggtcgagacgaaagccgagacgaaaaagaagtaatatcacgtaagtttatgtaaaaagcagggcgctgcggtcgtagtgccctgcttcttcatgcaggagagtttaccgatgacgctatttaattccagaaattccatacaccgcagcccgctgggcgctgtggcagacggcacgcgtgtgcactttaaaattacgctgccgcgcaatatccagtgctctgcctcctaccttttggtgcagcacccggataaccgcattgagtgccttgatatgttctggtgcggcatgaacggcaatgactacgagtggtgggagtgccactttacgccgcagaaaacggggctttacttctatcattttgagctgcgcacatcgcgtgggcgctctgtccttaaaaaggacctcggcggcgaggcgcgcgccggtgcgcgtgaagactggcagctgaccgtgtacgacggtgcatataaaacgccggactggcttgcgggcggcattttgtatcaaatcttcccggaccgttttgcgtcctccggaaaagcgaaagaaaacgttccggcagaccgcacgctgcatgaaaagtggcttgaccagccggactggaagccgaacgcacagggcattgtgacaaactcggattttttcggcggtgacttaaagggcatcgaggaaaagctcgattatttagcgtctctcggcgtgacctgcatttatctgaaccccatttttgaatcgcactccaaccaccgttacgacacggcaaactatgagaaaattgactcgctgctcggtgatgaggaagacttccgctcgctgtgcgcggcggcgaaagagcgcaacattcacgttttgctcgacggcgttttcagccacacgggcagcgacagcatttattttaaccgcgagggccgctacggcgacggcggcgcgtaccgctcgcagtcttccccgtattacccgtggtacagctttcggagctggccgaacgactacgaatgttggtggaatttcatcacgctgccgaatgtgcgcgaggaaaatcctgcgtatgacaactatatcaacggcgaagacggtatcatccggcattggcttgaggccggtgcttccggctggcgcttggatgttgccgatgagctgccggacggctttattgaccgcctgaaccgcgccgcgaaagcgcaggatgaaaacgccatagtgctcggcgaagtgtgggaagacgcctccaacaagacagcttacggtgtgcgccgccggtatctgctgggcgggcagctggacagcgtgatgaactacccgtttcgcgatgcaatcctcgggtttctgctcggtgagcacgcgtcgctcattatggatcgcattgagaccattgtggaaaactacccgccgcaggtcttacgcattttgatgaaccacatcggcacgcacgatacggagcgcgctttgacggtgctcggcggcgaaccggcgggcagccgcggccgcgagtggcaaagcacgcacacgctctccccggagcagcgcgaaaccggccttgagcgcatgcgccttgccgcgttgttgcagtttatgctgccgggcgtgccgtgcatctactacggcgacgaagccggcatggagggctaccgcgacccgttcaaccgcgcatgctacccgtggggacacgaagacgaggaccttatcgcatggtaccgctacctcggcctgctgcggcaggagcacggcgacattttaaaaggcggcggcctgcgcagtgtttatgcacacgacaacgtgctttcgtttgagcgctatatggaaacggaaggcggcgaggacgcgctgttcgttgccgtgaaccgcagcatggaaaacgcggtcattccggggctgcatcttgacaatgcagagtttattttcggcgcgccgtacccgaaccccgcaggtggcgatttcaagctgccgccgttcggcttcactttgctgcgcatccaccgcgaaaaaacggagaacggtgaaagctaaattttccctttctgcaaaatttttgcaaaattgaatttacacaccgttaccggcgggcttctttccttgaagcccgcttttttctatgctacaatagggttaacataatcgtcggatgggtgccggcgaaaaggggaaaagaggaagactgtatgatccgcattctgattgtggaagacgatgaaaatatctcgaaaatgctggccgccacgctctcgatcggcgactacgaatacgaccgctgcgcagacggcgaagaggccgtacagaccatcataaacggcacgtatgacctcattttgctcgatgtgatgctgcccggcatggatggctttgccgttttggagcacatccgcggggaaagctgcgaaacgccggtgattttcctgacggcgctcggtgcggtggcggacaaggtaaagggtctgcgcggcggcgcagaggattacattgtaaagccgtttgagcccgtggagcttttggcgcgcattgaagtggtgctgcgccgtgcgggcaaaagcgaaatgcacctgcgctacggcgatattcaggtggacattgaaaagcacacggcgctgaaaaacggcgtgcccgtggcgctgacaccgaaggagtttgacgtgctcgtctttttcatgcgcaacccggacgttgccatcacgcgcgagcagctgctctcgaacatttggggctttgatttcaccggtgaatcgcgcagtgtggacattcacgtgcagcaggtgcgccgcaaaatgggattgcagggcaagctcatcaccattccgaagctcggctaccgcttagagcgccgataagcgtaaagggagtcttttatgaagctatggcaaaaaatatcgctcattgcgctcgtgttcgtcacgctcgccgtgcagctcacgcagttttacatactggatagtcattttcgcagtgccatagcccgcgaggtcaattccgccgcttccgcacattcggcattggcggcttcgctttccaaccacgcggcgtatgagcgtttaaaggcgaacacgctgtttttgagcaccgatcagctgacggacatgctgaaggataccattacgacagacatttccaccgcggacgtgatagaagtgaaaaagggcggcaagaccatcacggcggtcggcaccgaggtcttggacggcgcttcgtatgatttagcttccgtcaagccgaacgatgccattacggacggcaaaacggtaatcttcgacgccggcgaaaagacgtacctcatggtggtctccatcatcaagctggaagccatgtcatatgagctgcgcacggtgtatgacgttacgaatgtgtatgacgagcacgacgccaacctgaacaacgcgcgcatgtgggggctttgctgcggcggcggtatttccgtactgctgctcatttccgtattggggtttctgcgcccgttaaagcgcgccgtgaagaccatcggcgcggcggccgcgggcgactacaccgtgcgtatgccggaaaagggcagctcggagctgaaaacgcttgcacacagcatcaacgagatgaccgcttccatcaacgagcgcgaggaaaagctgcgcggtattgcagaaagccgcaagcgctttgcggacgccatggcgcacgagatgaaaacgccgctgacgagcattttgggctttgcggatattctgcgcatcaaaagcgttgtcacggacgagcagcggcgcgactttgcctctgccattgtggaggaagccaagcgcttgcgcgggctttccgcaaagcttttgacgctggcttctaccgataacaccccgctcgattttgcggatattcccgtggcacagcttttctctgatgtgcacgccaccatggcgccggtgctcgggcggcgcggcatcaagctgacaacactgcacaaaaacgccgtgctgcacattgaccgcgagctgtttttatcgctgctttataacctcatcgataacgccgcgaaggcttccccggacaattccgaaatctggctcattcagtccgagctggacggccacacggtggtctccgtcatcgaccgcggcatgggcatgaagcccgataccgtgcgccgcgcaacggaagcattctacatggaagacaaagcgcgcagccgcaaggcaggcggcgcaggcctcggccttgcgctgtgcgacgacatctgccgccgccacggggcgcggcttgaaattcgctccacctaccagaagggcaccacgattatcattcacatgaatgtagcgcccattccgaaaagtcagggcgacgagctggaagcgcttttgcagaagcgcccgccgcgcgaaaaaacacgcgataaggcgcgtgaaaaagaacgccagaagcgcaaaaagcagcgcgaaacccgctacaaaggaggcagaacgatatgaaacgcaacatttttctctctgtttttctgcctttgttcctttgcgccgccattttgacgctcggctatttctcccccacactatttagccgcgtgatgccaaactttaaaaacaaggaaagtgccgcgcagattaccggcgcggaaagcccgctgtatttggaagacccctccagtcttgtcctgccgccgtggaatgagatcgacacttcaaaatcctccatatatgcaaacaatgacaacgccacgccgaacacgatgcggaatttcattttgcaggagctcagtgtctacggtgaaaggaatatggacgactggctgtatcagctcagcaatgagctttccgaccagaagacgtacattgaagtttcagatgcgtatgtgcgcagcatcattcagccgtttttaaagggctgcaatatttcgccgaatttgaaattctccgggctgatgcacacatacgacccgttcgacaacttggcttcgcttccgaaatacgtgtatgcacaggatgtgaccgtcaccacggtgcaggggcgcgattttaaagtggacttcgcgttcacgccgcaatccggcataccgctgtatgtacacgcaacagagatcgacaaagagaccgcctctctgccggacaacgaagcctttatggacattgcaggcgcctcactgaccatgtacttttattgctccgatatgcgttacagcgagaccgagtttgacaagatttttcaagatttctacgatagccgtgatgtctccggcaacagcagcgcctattatggtgcttatgaagcgatttcacgcctgccggacgagcttttctcctccttcatcagcgaaaacgactccctgcgcaacgcggaatggacctctaagctgttcacccgtctttccaacacgacgctcgacatctggtacggctttttttatgacttagattctcattacggcatcgattacaacaatgaatcgcttttggtggtccgcaacagcgggggctgcacatttaccctgacatacgacgccatttccaaaagcgtgaccggtttcggcttcgacccggattacagtgatgcttttgacaacaaccgattcttattgaaccaaacctactggataaaccgggattcggaaacagagtactcctcgccgtgaccttatcacatctaaaccttgtcccccgcaattttgcaacttttttgcagtttgcgggggacttttttgcgtttttttcggtatagttaaagcagaaagaggagaggggcgaatgcatgaccgatataaacagaaccgcgtgcacattttcgcgccccacgctgaacgcaaacaccttaaagctcattgcggtcctcgccatggtgctggaccacgccgccaccgtctttttggcagataccgcgcccgccgcgctgtttttccatgccgtggggcagattgccgcgcccatcatgtgctttttcgttgcggagggctacacgtacacgtcgaatctgaaaaagtacctgctgcggctgtttattgcggcggtcatctcccatgtgccgtatgcgctgtgctttaaattcacggtttgggagttctggtacgtgacgggcgttttgtgggggctctttttggggcttctcgccgtcacgctgtggaaacggctgcgcgcgcccgtttgggtgcggctgcttttgctcgggctgtgctgcctgctcgcttaccccgcaaactggaattacatcgccgtgctgtggatcttcggctttgccgtctttcgggaaagccccaaaaagcaatggtcgtttttcgggctcgtcacgcttttgtatgttttgcagtatttcgtctacggctctacgctgcccgtgtggctgaggccgttcgtactgctgtgtgtaccgcttcttttatgctacaaccatacgctcggccgccgaagcaaagttttgcagtggggctactacctgttttaccccgctcacctgcttgtgcttactctgctaagagaaattttcacccggttataaagaagttttaaaaagggggatctttatgcaaacgcgcaaaaatgcaaatttggcacccgaaagcttccgacacagtgctgtgccgcgccgcctaaagcaccgcgcacggcggcgcagacgaattttgtgccttttgccggtgatactcgtgttcgccgtgctcgccgcggcgctgctgcgctttacgcccgcgtttgcctacgccgatattttccccgcgcaggcaaccacccgccgcattaaagacgtgccgtacatttcgcagctgccaacgcttcccacgggctgcgaaagtgccggcgccgccatgctgttaaactactacggctgcaccgtcacggcggaggaatttgcttcctattacctgccgacgggcgacgcgccgcacacggacgaaaacggagagcttgtcggctgcgacccatgggaggcgttccccggcgacccgttttcggaaaccggctggggatgctactccaccgtcattgagcgcgccatgaacgagtttctcacaaacaccggctaccacgccgagcgtctgagcggcgtgccgctttatcgcctaaaaagctatattgacaacaacaccccggtgatgatctgggcgactatctgcatggagccaccgattgaaagcgacatttggacggtgccggagaccggccgggagattacgtgggtctaccccatgcacgcgctcgtccttacgggctatgacgaaaacggctactacttcagtgaccctctcgccgggcaggacatctactacggcaaagacagcgtggaggtcgcctacaccgcccttttcgagcaggccatcatcctgacaaactgaatacatcggacttacttcctccgcatacaaaaatccccgcacaggcttttaaacagcgctgtgcggggatttgcggtttataaggttagattgactccacgtcgatctcgccgtccttttcggtgacgagaataccggtgacgttgccttcgcctttctcgacaatgagggacgcgattttgtcttccaccgtgcggcggatggtgttgcggatatcgcgggcgccgctcttgccgcctacggcacgatgcgcgatgttcgcgacggcttcgtctgtccagcgcagcgtgatgccacgctcattaagcgtgccgacgtactcgttcagcatgagcaccgcgatcttcttgtagtcctcctcattcagcgggcggaagacgacgatctcatcgatgcggctcaggaactcgggacgcaggaaatcagacagcgcgcgcatggccttttcgcggctgatgtccgcgctggtgcggttgaagccgacgagcgcttcgcggctgttgctgcccgcgttggaggtcatgacgatgacggtgttctcaaagttgaccgtgcgaccgtgcgcatccgtaatgcggccttcgtcgagaatttgcagcaggatgttcataacatccgggtgtgctttttcgatctcatcgaagagcagaacggaatacgggcggcggcgcaccttttcggtgagctgaccggcttcatcgtagccgacatagcccgggggcgaaccgatgatcttcgagaccgagtgcttttccatgaactccgacatatcgaggcggatgagcgtctccggggaatcgaacagctctttcgaaagcacgcgcacaagctcggtcttgccggtgccggtggggccgacgaagatgaacgaggccgggcggcggcgcgggttgatctgcacgcggctgcggcggatggcggcggaaacagccttgacggcctcctcctgccccacgatgtgctcgctcagcttttcttccaggtgggcaagcttgccgagctcgctctgctcgatctttgcagcgggaatgcccgtccaaagctcgatgacatacgcgagatccgcttccgttaccggcgcggtaacttcgttcgggtcaaacgcggcaagctctttttcgagcgccgcgactttatatttcgcttcggcaagtgcttcgtaatcgacattctctgcgccctcgatctcggcttccgccttgcgctgcttttcgagcttcaagtttgcttcttcataatccgcaagctttttgttgcgcagcgcggcgcaggcacatgcttcgtccaacaagtcgatggccttatccggcaggtaacggtcgctgatatatctttcggaaagcacgacgatgcgcttcgcaatttggtcggaaacgcgcacgttatggtatttttcgtagtaatttttgatgccgcggatgatatccgttgcgtcgtcgatggacggctctgtcacggtgacgggctggaagcggcgttccagtgcggcgtctttttcgatgtacttgcggtactcggagaacgtcgttgcgccgatgacctgaatttcaccgcgggacagcgcaggctttagaatgttcgccgcgttcatgctgccctctgcatcgcctgtgccgacgaggttatgcacctcatcgatgaagaggatgatgttgccgtcctgcttcacttcgtccacaagtcccttgatgcggctttcaaactggccgcggaactgcgtaccggcgacgagcgccgtgagatccagaagctgcacttcttttttgcgcagcttcgcgggcacttcgcctgccgcaatgcgcagggcaagcccctctgcaacggccgttttaccgacgcccggctcaccgatgagacatggattattctttgtgcggcgggacaaaatctgcaccacacgctcaatctcgcgctcgcggccgatgatggcatccagctcaccgtttctcgccttcatggtgaggtcggtgcagtacgccgcaatgtgcttacgcttcgatttgtggaagttctccttctttttcttgtcattcggctggctttcgcgggtttccggctctgtgccgtcaccgtttgcgttcataccgaattgacccagcagttcggacgggaacggcaccgcgccgcccggctcaaagctgccgtcgtcggacatcgacatcaaatcgttcatgctttcggtcatcgcctccagctgctcctccgtgatgcccattttctccataatatcattcaccggcttaatgccgagctcttttgcgcagacgagacagtagccctgcgtggcgttcatatccgttgaaggggaaacgaacacaaccgcaggccgcttcttgcagcgtgtacacatcatcatagacattttcctttccggcgcagaccgttagtttttcggtgtgcgctctttctttgcccgcatttcttcgggcaggttcaaatcgtatttgccgtcggtcgatctcaaaatttcgcggaacacgccgaaatatcgaatgaacgtgtacaccatgaagcccgccgtgatgacgagcgccgtggtggacgcgatattgaacgtgctctcggaaaccttcataaagccgtccatgacgacgatgagtccgatggcgatataaaacagtgttgtggaaaccttgccgtaccactttgccgcgcacggctttttgccgtttttcagcagatagcatgcgccgcacaacatgacgagctcctttaagacgagcagcgccaaaagcggccaaatggacgggtagtgcacggcgatacagatggccaccgtgccctgcgtcagcttatcggctaacggatccagcattttgcctaattccgtgatctggttgaagtgccgcgcgatcatgccgtccagcgcatcggaaaggccggaaagccccagtgcgacgatggccgctgtgaggttgcctttcagaaaaaaatacgcaaaaaacggaatgaccaaaatgcggaacacagacatggcgttcggcaccgttaaattctgattgatgggtttctttgtcttttggcttttggcatcagacatagtgtagttcctttcccttacgaatttccgaatctccttttaaccgctgctcactgcattaagtgataagcggggttaaagctgccaagcagcttcaaaagcatggaagtgttctcaaacgcctgcacctttacctgctgcgctgcgctcagcatgggcacaaatacctgcgcacacgcgaggacgacccacaaaatgagcacaagcatcagcacatcgaatactgcgccgagcgcaccgttgatgccgctcaagaccggcagcgagaaaatacccgttaaaagcgttgcaacgcctctcagtaccacgatgaacaatacgaatagcaccagcatgacgaacacgccgatgacgttgatgagcatggggctgagtgcatccgtaatggcctctgcgatgctgtccgtcttatcctgcacctgcgccatgatactaccctgtgtgatgccggcagcctcgagcgcgcgctggataagctccgggaaggcatcgaaaacggtgttcacggcttcgcccgcgccaagccccatgaccgccgcagagatcttctccacaagcgaggggcgaaagaacgttgtaaagatccactctgcaacaggattgctcaaaagccccgccgcaatcatcgcgatgagcgcgccgcagaaatcaaagcatgctctgaaaaatcccttttttgcaccgatgacggccgcgatgatgacaagcaccacaacggcaatgtcaaatatccatcccaataaaaacactctcctttttccggcacgcctgccgcgcgccttgtgcgatacagtgattataccacattactctgtttgcgacaatgtattatcggcctcgatcaccttaagattttctttccgaatctcgcgcacgccgagcagatacacggtgctttcgtccgccatggcgatgctttttgtatcggccggcacattgcaggcggcttcctgccgcccggtcgtgaggtccgtggacacaacggagcttgaaagcagcgccgccaccttattgcccgctgcggaaagccacacggcgcggccggaaaggtcgctttccacgggatctgcgctgtcacggaaaatgagcagcgtgctgtcgccgccgtaagcatagttggaaacggagaccaccgcgcccgaagggatgagcgtgtaggccgtcacggtgcggccgtcatacgcatacggcgtaaagttatagctcgtatcgctgacgagcgtttccgtgtcgccgatggccgtcacgcggccgctgcggttccactgcacggcaaaaatcaggttgccgtcgctttcgtactccgctatcggttccgtttcggacatatccagcaccgtaatgcgcgaaatgagcgtacctgcgtgcgtgatggtgcttgccaccgcggctcttgtgccgtccgtattcagtgccaccgccgtaatataggaatccgcaaagctgtatttatactgcaagctgccgtttttgttatatacgcgcagctcggaagcgtagtccgagggctgcaccgccagcgcaaatttgccggaatcgcaaatgacgccggtcgtgatactgctgtcgctcgtgccggaaatctccgtgccggaggacgtttccacacggtaacccgtgccgccggcgttatacaaaaggtagcgtccgctcgcttcggagaccgcggggtcgttgtagctgtggcgcgcggagaacatctcctttgcggagccgttcagaaccgtcagcgccgtgtcgctcacaacgtacaaattgccgtccgccgcgccgaaattacccgcaagcgcggtgctgccggtcagctccgccggatagccgtcgccaaagccgaagccgactgcctttgtgcggatccagttgccgatgttttccggcgttaaattatctttattttccaaaatgataagcagcactaccgcgatgagcagcgccgcaatgatgcggtacaaaagcttcgatacgcgcggctttttcttttccgaaagcgcagggtgttccgtttcatccggcatatcctgcacaggcggtgcttcttttttgcgcagcgcgtgctttttttctgcttcatgcttttttcttgccatacttttctcccttattccgcgttacaaaaatcggaatacagaacatttatccaaccaaaccgcagattttatatttgcgattcataaaacactttttctgaacacaagcccacagatacgttgttttttcaaaacaacgtatctgttttcttaaacctgcggttcgtaaaagaccttttctaaatacagaccacacgccggggcggtcggccccgcaagcttgcggtttttcccctcgatgatcttcgggatatcctcggggacaaagcgcccctgctgcacggcgagcaaagtgcccgtcatgatgcgcaccatgttgtaaaggaacccgtccgccgccacggtaaagcgcaccatgtcgccctcgcgcgtgacggagctttccgtaaccgtgcgggtaaagtcccccatgtcacggttatcgagtgtacagaacgaagtgaaatcgtgcgcacccaaaaagtgttgcgcggcttcgttcagctttttttcatcgatatggtgatagtaatgcagcgcgcgcccgtgcagaaacgggctgcgaatggggttgttccagatttcatacacataccgttttccacagcaggagtaccgtgcgtgaaaatcaagcggcacttcttcgcaggaaagcacagcgatgtccggcggcagaaaatgattgagtgcgcccaaaaggcgctccggcgggatattgtgcgaaagctgcatgctcaggcagaattcccgcgcgtgcacgccggtatccgtacggctgcacgctttgatgtccggctgcgtatgcaaaacctgctttaacgcctcctgaaacaccccttgcacactgcgggcgttttcctgcacctgccagccgtggtacgcgctgccgtcatattgaattttcagcagcaggtttcgttccatagtttctcctcaattttatcgcacaatggcggcaggcagcaaaatgttcgctgtgatgaacgccgcaaggtacaaaacgcacacgataagcgtgatgtaatcgtcttttgaaaggtgcagcaccttcattttcgtgcgcccctcgccgccgtggtagcagcggctttccatggctgttgcaaggtcaaacgcacggcggaacgcggaaacaaacagcgggataagcaccggaatcagcgccttgatgcgctgcatcagaccgccgctttccatatctgcaccgcgggccttctgcgccgccatgatcttctcggtctcttcgaggagcgtcggcacaaagcgcagcgcaatcgtcatcatcattgcgaattcatgcaccggcacatgcagcagcgccagcggctttagcaggcgctcaatggcgtccgtcaactgcgtcggggacgttgtgaacgtcagaatagagctgatgaggatgagcaccacgatgcgcacggcgatcatgatgctgttcacgatgccgtttcgcgtaatgtgaatgaacccgagcgtgaagatcgggtcgccggtgccgtaaaacaaattcaatacgccggtgaacgccacgatgaacaaaataggcttcatgctttttaaatagagcttcagcggtactttggaaagcaccacgccaagcaggctcataagaatcgtcgcgccgagcgtgacaaaattcttcgagcagaaaatgagcacgatgaaatacacggtcaggcacattttaatgcgcggatcgagcctgtgcatgacggatttgccggggaaaaactgccccatggtgacatcagatagcatggtttttgtcctcctctttcctttttttgaggagcggcaaaagctccatgacggcttcgtctacatttaaaaccgtctcgctgaccggcaggcccattttgcgcagacggcgcatgatggacgtgatctgcggcaggcgcagacccatcggctccaaaagctcgccgcgcgagaacacggcgcgggtctcgtcgtacatttcggcatgggcgttgttcatcacaagcacgcggtctgccacgcggccgatgtcctccatactgtgggagacgagcaaaatggtgttgccgcgctggcggtgatattcggagatctgcgctaagataacatctctgcccttcgggtcaagaccggcggcgggctcatccaaaatgagcacctccgggtccatggcgatgacgcccgcaatggccgcacggcgcttttcgccgcccgaaagctcaaacggagatttctccaaaagctcaggctttaagtctgtaaagtgtgccgcttctttggcgcgcttcagtgcctcttcatcggaaagtcccatgtttttcgggccgaacatgatgtctttgataacggtctcttcaaacagctgatattccgggtactggaacaccatgcccacctgaaaacgcacgcggcgaatttccttcggctttgcccaaatgtcctcgccgtttaaaagcacctgcccgcttgtggggcggatgagaccgttgagcatctggatcagcgtggatttaccgctgcccgtatgcccgatcacgccgacaaacgcgcccttttctacggaaaggttcacgttttccaccgccgttttttcaaacggtgtgccgacgccgtaggtatatgtgagatttttggtttccaaaattgccatcgattttcctcgtttcctctgccgggtgcaggtcctttcggttcttgccccgcacaaaaaacaaaatcccttttatattcttatcccaattttaaatactccgcaatcgcttttacgcactcgtcttcatcgagcggcgtgccggaaatgctgcacccggcagcgtttaagcggtaaataagctccgttgcctgcggcacgtcgagcttgtggcgctttaaaagctccacctgcgcgaacaccgtgcgcgggtcgccgtccgtcagaatgctgccgccgtccatcaccaccacgcggtcggcctgcacggcctcgtccatgtagtgcgtgatgagaatgacggtgatacccttttcgcggttcagataccgaatggtatccatgacttcctgtcggccgcgcgggtccagcatggcggtcggctcatcaagcacaatgcacatggtctccatcgcgataacacccgcaatcgcgacgcgctgcttctgaccgccggagagcttatgcggcgcatggtcgcggtactcgtacatgttgaccgctttcagtgctgcatcgacacggcggcggatttctgcgggctcaataccgaggttttccgggccgaatgccacgtcttcctcaacaatacccgcgacaagctggttatccgggttctgctgcacaaggcccacgcggcggcgcacgtcaagctgcgtttcctccacggcggtatcgatgccgtctaccgtcacggtgccggaggtcggcaccagcataccgttaaacagcttcgccatggtggatttaccgcagccgttgtggccgagcagcgccacaaacgaacccttttcaatgtcgagatcgacgccgtgcaggacctcgccgctctctccgctgtatgaaaaatgcaggtctctgcactcaataaacgccattttatcccttccgtttcaaaaaagtcccgttataccggctcgcccgaccagattgccgtgctgccgcagggcagaacaagccccgtttccgtcaccggcaagccgatttcatctgcggaaacatagccgccgaacttcgggcgcagcaaaacgccgagcagatacgccataacggacggagaaagtcccgttgtgtacgaattcaaaatgaagaacagcggattgtccgtcaagaccggcacgcacatttcaacaagaccgtaaagctgttcctcaagcttccacacctcgccgccggggccgcgaccgtaggacggcgggtccatgatgatgccgtcgtaatggttgccgcggcgaatttcgcgctgcacgaatttcacgcagtcatcgacaagccagcgcaccgggcgctctgccaaattcgatgccgctgcattttcgcgcgcccactgcaccatgcccttggaggcatctacgtgcgtgaccgtcgcgcccgcttccatacacgcgagcgtcgccgcgccggtgtagccgaataagtttagaattttaatttcgcgctcgggatttttctcctttgccgcgtggatgcgcgccgcggtgtaatcccagttcacggcctgttccgggaaaacgcccgtgtgcttaaagcccatgggctttaagcggaacgtgaggtcgccgcgcgtaattttccacacgtccggcagctttttataaacctcccatttgccgccgcccgtagaggaacgcttatagcgcgcgtgagcggaacgccaacggggatcttttttctccgacttccagatgatctgcggatcggggcggatgaggagaatgtctccccaccgctccaaccgctcgccggagccggtatcaatcaattcatagtctttccagtttgctgctctcatcagaccaattcttccttaatcacttcagaaatatcgtttgcaagcttttcaatcagcgtcaaatctctgccttccaccatgacgcgcagcagcggctctgtgccggacgggcgcacaatgacgcggccttcaccgttcagcgttgcggttgcctgctgaatagccttcttcaccttcgggtcggtgtggaacgccagcttgccctccggcgagaccttgatattcaccatcgtctgcgggtagcgctccatgacggtcttgagggaagaaagctttgcttcgcgctgctttaagatgctcaaaagctgcgctgccgtcagctggccgtcgccggtcgttgcgaaatcgcggaaaatgacgtggccgctctgctcgccgccaaagctgtagttttcaagcagcatttcttccagcacgtaacgatcgccgaccttcgtcgcttcaaagtggatgccgtttgcttcgcagcactttacaaagccgaggttcgtcatgatggtgccgacgatgcagtccttattcagcttaccgcggctcttcatatcgaggccgcagattgccatgatgaagtcgccgtcgatgacttcgccgttttcgtccacggcaaggcagcggtcggcgtcgccgtcaaatgcgatgcccgcgtcgaccttatgcgtcttcacatattccacgagcgattccatgtgggtggaaccgcagttatcgttgatgttcgtgccgttcggctcatcatgcagcatgtgcaccttggcgccgagctccataaacagtgtttccgccgtcatcgcggaggagccgttcgcgcagtcgagcgcgatttcaaggcctgtcagcgagaagtgcaccgtggacttcacgtgatcgatatagtcgcgcagcgcgttcggcgcatgcgacaccgtgccgaggtcgctgtctgcgggcagcggcggcagagccgcttcgccgaggatcagagactcaatgcgctcctcaaggtcgtccggcagcttgtagccgtcgccgctgaaaattttaatgccgttatactcgtaagagttgtgtgatgcagagatcatcacaccggcgtctgccttgtatttttccacaaggtacgccacggccggggtaggcacaacgcccagcagaacgaccgatgcgcctacgctgcacaggccggctgccatggcgttttccagcatgtcgctcgaaaggcgggtgtccttgccgatgatgacgcgcgggtggcggttcgatttgttgatgagcacagcagcggccgcgcggccaagcttcattgcaagctcgcaggtgaggtcatggttcgcgacaccgcgaacaccgtctgtaccgaataatcttcccataatcgtatgctcctttttatatcaaaaaattttaaggggtgacttttttgattcttttcaacctgttcccccgcatgccgattgcacgcgtttccaaaagagtgtcatacgtcgaatctcgggttatcgtccgcaacggttcccggcggcgtaagtccgaggtgcaagtaagccgcgcgcgtggcacagcggccgcgcggggtacgctgcaaaaagccgatctgcatcagatacggctccacaacgtcttcgatcgtcacggcttcctcgccgatggccgccgccagcgtttccacacccacggggccgccgttataatactggataatcgcgttcagcatacgtctgtcgccggaatcgagcccaagctcgtcaatctcgaggcggtcaagcgcaatcttcgccgtgctgtatgtgataacgccgtcgctcatgatctgcgcaaagtcgcgcacgcgctttaacatgcggtttgcgatacgcggcgtaccacgcgagcgcgaggcaatctccagcgcaccgtccgcttcaatgtcaatacctaaaatgccggcgctgcgggtgacgattttcgcaagctccttcggctcgtagagctccaaacgcaacaccacgccgaaacggtcgcgcagcggcgcagaaagctgacctgctcgcgtcgttgcaccgacgagcgtgaagcgcggcagcggcagatgataggatgccgccatttgccccttgcctgtaataatgtcgagcgcaaagtcctccatggcggggtacaaaatttcctctacactgcgcggcagacggtgaatttcatcgatgaacaacacatcaccggggttcagattcgtcaataatgcggcgaggtcgcccggcttttcgatagccgggccgctcgtgatgcgcagattgacaccgagctcgtttgcaatgatgcccgcaagcgtcgttttgccgagacccggcgggccgtagagcaggacgtggtcaagcgattcttttctctgctttgccgcctgaatgaacacctctaagttttcttttactttttcctggcccacatagtccgcaaaggtacgcgggcgcagcgggttttccacctccgcgtcctccggcacatactccggcgcaatgacgcggttttcaaaatccatttcgttgtctccgtcaaacgtcacgcgaaaagcactctcctttcagcgtgtattaaaagcggcttgccatactctttaaagcgccgcgaataagttcttccgtagagagggagccgtccagcttcgccacggcctgcgcggcctcggactgtgtatagccgagcacaataagcgcctgtacggcctgctcggcattctgagacgcggaaacaatgcccgcgtcgtccgtgccggtcagctccagcgtgccgcccgtaaagcccatcttcttcacgcggtctttcaattccagcacgatgcgctgtgcaagcttcgggcccacgccgctcgcttttgtaaactttttgctgtcgccggaggccgccgccatggcaaccccctccggggtcatttcggataaaatggaaagcgccgccttcgggcccacgccgctgatggtcgtcagcatcttgtagcaattcagctcgctttttgtagagaagccgtataaatcaagcgcgtcctcgcgcacgtttaaatgcgtatagaccgtagccgtttcgccgatgcgcggcatgtttttctgcgtgttcatggaagtgaagcacttaaacgccacgccaccgcattcaatagcgacaacgcccggctccatgtgtacaagtttcccggtaagactgtaaaacatcgcttttgtcctttctataccctctgtactctctgtccaaatagacggcgttacctcaaaaactgccgcagcgccgtgccggaggcatggcagtggcaaatggcaatggcaagcgcgtccgccgtgtcgtccggcttcggcacctcgcgcaggcacaaaaggcggcgagtcatttccatcacctgcggctttaaggccttgccatatcccgtaacggccaatttcacctgcacgggggtgtattcaaaaacaggcacgcgggccttctgcgccgcaagcaaaataacgccacgggcttccgccacaccgatgccggtcgttttattgtttgaaaaatagagcttttccacggagatcgcatccgggtgatactgcgccaaaacctgcgcgatgccgtcgtaaatgatctccaaacggcggttgaaatccgtgcccgctttggttgtcaccgcgccgtgctccaacgtgcggtaacggttatttttcatttccaccacgccgtagccgacaatggcgtagccggggtcgatgccgagaacgatcatgccgtttttcctttcaaaaccaaagggcagaaaagcccatactgccttatagtatatcatatctcagcccttttgaatagccgaaaatttcgaaaaaattgtgaacggcacacgggttttccgtataaaaagcggacacaccgccaaaaagccgtgtgcccgcaaaaaacttattattttttactcggcgagcgcctgtgtacgcgctgccatgtccgaaatatgcacgagtccgaagccgtccacgccggaaagcacacggtcattgagcggcgccgtccagacctccggcaaaagctgtgcacccagtaccataccaagcacagagcccgccgtggcgcagttgcagtccgtgtcaaagcccatcgtcaggcacagctccatcgtgtaggtgaagtccttcttgccccacaataagcccatcgcgacgattgccgcattcgagacggtgtgacaccagtggtgctgattattttcatcgtacttgccgaggatatatgctttcgtctcctcagcggtgtcgccgctttcaaagcggctcaaaatttccgcaagctcttcataaagacgactctttttcgggatctgcttcatgccggagcgaatgatggtcggcatgtcgtcgttaaccgccgctttcgcaagcatcgaggcaatccacatttcgccgtagatgccgtttttcacgtgagagatggacgcatcgcgccatgccatttccgccgccgtttccatatcgccggggcaaatatagccgaacagatcgcccctgatctgtgcgccgatccactccctgtacgggttgcggtacaacgccgattccggcgggaaaacggattgtgcgaggttgatatatgccacgcgctccgccgtgcacaggtgtaaaagcggcaggttcatcagccagttttccgccgcgtcatcgggtgtgaaattgcgcccgtactgctcgacgagctttaacgcgatgagcgtgtagttcgtgtcatcgtcctccggcatgtaagagacgttgttaatccacccggttttttccgcgccgtaggcgtgtccgtcgttgcgcacgttgtatttttcgcgcagaacaggcccgatatcggacgaaatgtagttttgcagcggcaggttgccggtctctttcaaaagcccgttgatacgtgcacgccgccagccctctaccggctgacccaacaggcaacccgcacagcggccgagccacgcgccgtagattttgtcgcaatccgcttcggctttctctttcggctcaccgacagatgccgccttgatgcccggaaggtcggacggctcgtctttgtcctgcgggttttcaagcgcacaaagctgctctaaaagctctgcgcctgcggcggtacgcgccgcgccgcgcggcatttcttttacctgctcggcacgctctttaaagcgttccgcttccaaaatgccctcgtcgatcctctgctcgatctcaatgggcaaatcgtcacaaaaatcaaaccacaactgttctctgagcataagctgtctcctctccggcgcatttgtgtctgcataaatatacgacatgcaatcgctttgcgcgtaatggctgaaatggttatttcacgcacatatcgtgcgcgatatttctgtttttaattatactgcataatttctcaaaaggcaaatacaaaacgccgtgcgaaaacacagcgttttgtacaatcaatctttcattaacgtgaccataacggccttttgtgcatgcaggcggttctccgcttcgtcgaagattgggcctgcgttcgcctcgaacacctcttcggtaatctcctcgccgcggtgtgccggcagacagtgctgtacaatggcatcgctctttgcaacgcccatgatcttctcatcgatgcaatagccagcaaacgccttttcgcgtgctgcgcgctcttcttcctgacccatagatgtccacacgtcggtgataacgacatctgcgtcctttgcggcaaccatcgggtcatcggtcagcgtgaagtagtcatagccggctgcaaaatcgagaatctcctgcggcgggcggtagccctccgggcaagccacagcaacttccatgccaaccttcaggccgccgacgatgagggagttcatcatgttgttgccgtcgccgatgaagcacatcttcaggccgtcgaacgagcccttatattcgcggatcgtcatgaggtcggctaagatctggcacgggtggcagaaatccgtcaaaccgttgatgaccggcacggagccgtactttgcgaggtcttcaacctccttctgctcgaaggtgcggatcatgatgccgtccacatagcgggaaagcacgcgtgcggtgtcctgcaccggctcgccgcgaccgatctgtgagccttcgcccgcgagcacaacggcatagccgccgagttgattgatgcccacttcaaacgaaacgcgcgttctggtggaagacttctcaaaaatcatggcaaggcacttgccctttaagtggtggtgctcgatgccgtgctttgtctcatacttgagctggtcggcaaggttcagaatgtcgatgatctcctctttggagagatcgagcagttttaataaatgtttcatgggaatttcctccgtttatttaatctgttccgcaaaaatcgcgagaccggcatcgatctcttcttttgtgatggtgagcggcggcagaaagcgcacaaggtccttcgccgtcaaaatgagcagacccgctttcgcgcaagcattcagcacatcatgggcgtccttgtccttcactttcacgccgatcatcatgccgcggccgcgcacaaactcgacgttcggcattttaagcagtcgctctttgaaatactcacctttttcctgcacttcttttaagaattccggcttggatacgcgggaaacgacctccaccgcaccggcgcacaccacggggtttgcaccgaacgtggagccgttcatgccgggggcaaagctatcctttactttctcgcccgcgatgcatacgccgatcggcaagccgccgccaagccccttcgccgccgttacaacgtccggcagaatgcccgcgcgctgatagctgaagaagtagcccgtgcggccgatgcccgtctgcacctcgtcaagcatcatcagcacgtcacgctccgtgcacagtgcacgcacggcctttaaatagtcttcctccatcggcaccacaccgccttcgccctgcacgctctcgagcagcacggcgcagacctcggggtcagagagcttcgctttcaggtcttccacgtcgttgcccttagcatacacaaagccctcggtcagcggggtgaaaagccgatgaaagccatcttgacctgttgccgccaatgtggtgagcgttctgccgtgaaaagaattttccagcgtgacgatcttatacgcgtgcttcttttcgccgtatttacgggcaattttaatggcgcactcgttcgcttccgcgccgctgttgcagaagaacgaacggcaaaggccgctgttttttgcaagcagttccgcaagctgtgtgtttttatcacagtaataatagttcgacatgtgctgaattttgcccgcctgttcggtgacggccttcacccagccctcgtcgcaatagcccagcgcatttacgccgatgccggaggtgaaatcgtagtaatgcttgccctccacgtcccaagcctcggcgtttttgccgtggctgagcgccacgtccacacggccgtaggaatggaggatatactcctgttcctgctttttaattgcttcaaaactcatattcaaaattccttttgtttccacaatatcgtctgtaccctgttgaaaacatatccgcacttgtcttccacaccgatactatcgccgacgaaccccggtgcttctcccattcgccgttttcgttcacgggtacgggcgcggttttccctctcaatagaacatcgtgccgatgccttcatcggtgaagagctcgaccagaatggagtgcggcgttctgccgtcgatgatatgcgcgcgctctacgccgcggcgcacagcctccacgcagcagtcaatcttcggaatcatgccgccgctgatgatgccgtcgcgtttcagcttcggcacgtcgctgacgtttacgaccgggataagcgtgttttcatcgtccttatcccgcagcagaccgacaatgtcggtcatcaaaatgagcttgcgcgcgccgagctccgccgcaatgcgcgccgccgccacatcggcattgatgttgtacacctcaccgtggtagcctgccgccaccgtggagataacgggtgtgtagccggaagcaatggcatcttcaacgatcttcgtgttcacttcacagatctcgcccacaaagccgaggtcttcggctgcgggcagcttatccgccttcagcatggaaccgtcaaggccgcacaggccgaccgccttgccgccggtgttttccaaaagctgtacgaggtctttattgactttgcctgccagcacctgctgcacaatatccatcgtctccgcgtcggtatagcgcataccgccgacaaagcggctttccttgccgatttttttcagcatgccgctgatctccgggccgccgccgtgcaccagcacgacattcacgccgacgagctgcatcagcacaatatcgttcatcacggcttctttcagctccgggttaatcatagcattgccgccgtatttgacgacgatggtctcgcccgcccaccttttgatatacggcatcgcctgcacaagcacatgggcgcgatcgctgttcgagatgccgatcttcttttcttcactcatgttctgtaatctccgttgattttcacatagtcataggtgagatcgcagccgaaggcttccgcctccgcgtcgccgctgttgagctccaccagaatggtaatttccttttcatgcagcacctttgcggcttcttcctcgctgaagtcgatgcccgcaccgttcacgcagacatctacctgcccgtacgcgctcttaaaggacacgtccaccttgttgatgtcgatatccgcgccggcataaccgatggcgcacagcacgcgaccccagttggcgtcttcgccgaacatggcagccttgagcagagaggagcagatgacggactttgcaaccgtcttcgccgtctcccaatccttcgcgccggtcgtcttgcagatgagcagcttcgttgcgccctcgccgtcgcccgccatcatcatggaaagctttctgcaaaccgccgtcagcgcctcaagaaacgtcttgtacgcttcgttttcttcagtgatctcctcgttttccgcctcgccgttcgccataatggcaagcgtgtcgttcgtggaggtatcgccgtccacgctgatcatgttgaatgtggtgtctgccgccgccttaatggccttttgcagcatcggcacggaaatggcgcagtccgtcgtgacaaagcacagcatcgtcgccatgttcgggtggatcatgccggagcccttggagatgccgccgatgcgcacttctttgtcgccgagcgtaatctttacggcgcactctttttcgatggtgtcggtcgtcatgatggcctttgccgccatgttggaaccgttttcgttcagcagtgccgccaacgccggggctgcattctcaatcggcgcgatcggcaaaatctgcccgataacgcccgtagacgcgacgatgacatcgtgcgggtcaatgccgagcgcttcgcccgcgatttcgcacatgcgccacgctttcttttcgccgtctgcgttgcaggtgttggcgttgccgctgttgcagatgaccgcctgtgcgcggccgtccgcgatatttttgcgtgtgacaagaatcggcgcaccctttacaaggttctgcgtgtaaacgcctgccgccgcacacggtgttttgctgaaaatcatagccagatcggctttggacttatttttgcggatgccgcagtggatgccgccggctaaaaagcccttggccgcggtgacgccgccttcgataaactgcatactgaattgctccttatataaaaatcgcttttccttaatttcgtactcttttagaatgccggcggaacgagctttaagccgcaggtctcgtccagaccgaacagaatgttcatgttctgaatggcctgccctgccgcgcccttcaccatgttatcgatagcgctgatggcgatgaacgtgccggtgcgcgggtccgtaaagatggacacgtcacagaaattcgtgtacttgatgttgtgaatatcggcgctcttgccctttggcagcaaccgcacaaacggctctttgccgtatctttcctcatacgccgcgcgaagcatttcctccgtaacgctcggcttgagttttgcatagcatgtcgctaaaatgccgcggttcaccggcagcagatgcggcacgaacgtgatgtgcattttctcacccgaaattttggaaagcgtctgctcgatttccggcgtatggcggtggcacgcgactttatacgcggacataccctcattcagctccgggtagtggctgttctgcgccggctttctgcccgcgccggtcacgccggacgcgcaatttgcgatgatgccggtcgtctcgatatagcccttttccagcgccggcacgagtgcaagcggcaccgccgtggtgtagcagcccgggtttgcaacgagcttcgtctttttaatttcctcgcggaacagctccggcagaccgtacacggctttttcgtgcagcgccttatccgtaaatgtgccgccgtaccactcggtgtattcttcctcgctctttaagcggaagtccgcgccgaggtcgatgaacgccttgccttttttgtcacactccgcagcaagctcctgcgaaaggccgtgcggcaaagcggcaaagatgacatcgcttttttccacaaccgcttcctgcgtggtgcagatgaggtcgcacatttcgcggtatgccgggtaaacgtccgacaaagcctgtccctcaaagcttacagagctgatggccgcaagctccgctgcgggatgccccgcaatcaggcggcagatctccgcgcccgcataaccggtggcgcccacgacgccgaccttaatcttttccatttcgataccccccaacaaaggtaaaattgaatttatagcccgtttacgatcgtgcgcacttcttttgccgccgcgcggacgttttccgggcacggcgcacccttgaccttgcggtcgcgcacgcatttttcaaggttgatggcctcgtacacgccctcgtcgaacgcattacagacctttttgtattcgtcgatcggcagcgtctccagcgtcaggccgcgctcgatgcacaaggcgacaagctcgcccgtaatcttatacgcatcgcggaacggcaggccctttgaagccaccagataatccgcgcaatccgttgcattgatgaagccctttgccgctgcggcgcgcatgttctctttcaaaacgcgcattgttttcagcatcgggataaacggcgtcaggcacaggcgcagggtatccaccgcgtcaaacacggcttccttgtcctcctgcatgtccttgttgtacgcgagcggcagacccttcatcatggtcaaaagcgccatcaggtcgccgaacacgcgtccgctcttgccgcggataagctccgtaatatccgggttcttcttctgcggcatgatgctggagccggtggaaaacgcgtcgtccagctcgatgaatttaaactcccacgagcaccaaagaatgatctcctcggaaaatctcgaaagatgcaccatcgcaagcgaaatcgccgcggcgatttccgcgcagaaatcgcggtcggcaacgccgtcgaggctgttgcggctcacgccggagaagccgagcagcttcgccgtcaaatcacggtcgagcgggtacgtcgttccggccaaagcgccggagccgagcgggcaaacgtccatacgctttaacgcgtcctgcatacggccgatgtcgcgcaggaacatttcggcatacgccattaaatgatgcccgaacgtgatgggctgtgcgcgctgcaaatgcgtgtagcccggcataacggtgtcggcatattcctccgcctggtcgcacagtacgttaatgagctcttttaactgttccatgagccccgcgcactccttgcgcagcgtcagacgaacatccagcgcaacctgatcgttgcggctgcgtgcggtatgtaatctcttgcctgcgtcgccgatgcgcgccgtcagctcgccctcgataaacgtgtgaatatcttcggcatcggggtcaatgtgcagagcgcccgtctcgatgtccttttcgattttctcaagctccgcgcagatcttttcgctttcgcttttgttgatgattcccgccgcgccgagcattgtggcatgcgcaatgctgccctcaatgtcctctttgtacatgcggctgtcaatagaaatagacgagttaaagtcgttcgtcttcgggtctgcctccttctggaagcggcctttccataatttcatggctgaatctttccttcccgtttatggcagaaaagggcaggcagatgaatgcctaccctaaatctacttttggattatttattttcggtctttgccttcatgtgtgcataaaccttgatcggcaggccgaacaggttgatgaagccgtttgcatccgcctgattgtagacctcatcctcatcgaacgttgcgatctccgggtcatacaggctgtacggagaggtgacacctgcatcaatgatgttgcccttataaagcttcagcttgacatcgccggtgacggtctgctgggtggaatctacgaatgcggaaagcgcctcgcgcagcggggtgaaccactggccgtagtaaacaagctctgcaaacttcaaaccgatctgctgcttgtagtggaacgtgtctctgtccaggcacagctcttcaagcttattgtgcgcgtggtaaaggattgcaccgcccggagtctcataaacgccgcggctcttcatgccgacaagtctgttctctacgatatccgcaaggcctacgccgttcttgccgccgagctcattgagcgtcgttacaacttccacaccgttcatttccttgccgttgatggcggtcggcttgcccttttcaaagtggattgtcacataagcgggctcatccggggcctgctccggggaaacgccgagctcaaggaagcccgggtggttgtactgcggctcgtttgccgggtcttcaaggtcaagaccctcatgggacagatgccagatgttcttatccttggagtagttggtttcacggttgatcttcagcggaatgttgtgtgcttccgcatactcgatttcttcttctctcgatttgatgctccactctctccacggagcgatgatggtcatttcgggagcaaacgccttaatggtcagctcgaaacgaacctgatcgttgcccttgccggtgcagccgtggcagatggcgtctgcgccctcggccttggcaatttcaacgatgcgctttgcgatgatcgggcgggcaaaggacgtgccgagcaggtacttgttctcgtagaccgcacctgcctgtacggtgggataaacatattcctgaatgaattcttccttgaggtcttcaatgtagagcttcgatgcaccggtcttcagtgctttttcttccagaccgtcaagctccgtgccctgacccacgtcggcggaaaccgcgatgacctcgcagttgttgtagttttccttcagccacgggatgatgatggaggtatccagaccaccggagtacgccagaacgacctttttaatatccttctttgcctttgccatgatgtaacccttccttttttcataaaccgccgtcatcgtgcggcggagaattatttgtttcaacggtcactattatacaccgttttctggaaaaatcaacccttttttgaatatttattcatcttttttgaaggttgtcaaaatttccagatttcatgcgggtttttcggctttatatttgtgtatttttcaaaattcaatcttcaaaagtatgcatttttgaatgaataaagcgcatattatacatttgtatacaccgctttatacatttttgctttcggaattgttttctacgatatagggctttatcagcgccatttcgcgcggctccacacgggcatgaataaggagcccttccgccacgtattcttcggagacgagcgcgcccgcttttctcagctgtgccgcaatgcccgtctttgcaaacggcagcagcgccgccacgtccaccggcttcaccggcaggttatcttcaatcgcctgcaaaagcgccgggatgccttcgtttttcagcgcactgatgcgcaccgcgcccgtcaaatgcaaagcgctgtccgcatcgcccacaaggtcccatttattgagcaccgggataaccgggcggtcaccgcagccgaggctctgcaaaatttcatttgtcacgtccaagtgcgtgcgcgcttcggggctggaagcatcgcacacgttcaaaatgatgtccgccgttgcagcctgctccaacgtggagcggaacgcctccaccaaatggtgcggcaagcggcgcacaaggccgaccgtatcgatgagcataacggtcttgccgccgggcagcttcaacgcgcgcgccgtgggatccagcgtcgcgaaaagcttatcctccgctaaaacgcccgcttgcgtcaagagattcatcaaggtcgatttgcctgcgttcgtgtagccgacaagcgccaccgtcaccgtgccgtccttttcgcggcggcgctgcgtctcgtggcggccgacttctattttcttcaactgttcgcgcagcgcttcaattctgcggcgaatgtgtcggcggtcggtctccagcttcgtttcgcccgggccgcgcgtgccgatgccgccgccgagacgcgaaagcgccgtgcctttgccggtcagacgcggcagaagatactttaactgcgccgcttccacctgcaccttacccgcgcggctctgcgcacgctgcgcaaaaatatcgaggatcagcatcgtgcggtccacaacgcgcacgtccgtcgcattttcaaggttgcgaatctgcgtcggcgtcagctcgcggtcaaaaataatcagctcaatctcgttgttctcgcagaaattccgaattttctccaccatgccgctgcctacgcacgtcgcggtctccggggaggggcgcttctgcatcatcgtcgcaataggctcggcgccgccgctttttgcaagctcccacagctcgcgcagcgattcctctgcgtcatactcgcccgtgtccagcgagaccagcagcgtgcgctccggcacgattacgttttccgtataattcataaggttctcctttttccatttctgatctatcgtttcaaagccgcagcgttttccgccgcagtttgctgtttcccactttctattatacagaaaacaaagaagaaaacaacgtgcttttacgaaaaacggacccacaccgcgtaaaataacatttgcaccaaccgccgccctgatgttttggcggtttcttccatagttttcgcccacagtcttatgctataatggagctgtaaaactcggaaaggatgagccccatgtaccgctttgcccccccagtaaacacacccatttttaagaaagggccgattttatgaaaaagcaatttgcggtcatgtcctgccttttggcgatatttacatgccttgtcgggtgctccggaaaaacggaaagtctgtttccgtctgcgtttgtccgtgcggtgggacaggaaaaagcggacgcgctgaaaacgctcggtgtcaccgagcaggcgctctccggctatactgtggacgtttacggcaaaaccgccgatgtgcagctttcatttgacgcataccgcggcgatgaaacctccgccggcaagctcaattttgcggaactcacggtaacctgcacaccggacgatgccggtttcaagtacatgcgcacctgctatgaccggctcaaagaaacgctcggcgaaccgttcacgaccgacgtgaacatggacggcgcttccgccgaagacgataccgatacgctttttgcggcgctgcaaaaagatgcaggcggcgaaaacatctgcgccttacaataccagtggcgcggcctcggtgaaaacgaatcgctgctttacctttattactatccgaacgaaaacggctcggcgcgcgtaaagctcacgtttttgccgaaagagcgtgcacaaatttcataaagctctgtaaaaaggcgcggaagttttgaaaagctcctgcgctttttgcgttttcaaaaaatttgcaggttttcgatttgctttttttcgcgtattgtggtaatatacaatattatcatacatgccaagcggcatatggctgcggcaaattttttgtaggaaagacaggttattttttctcagatggacagtcacagtacagggttgatcatagcgttgatcgttctgatcgttttgtccgcctatttctccgccacggaaacggcgttttcgtcgctcaaccgtatccggctcaaaaacttggccgataacggcaacaagcgcgcaaagctcgcctataagctcgtggataattacgacgagctcatctcctccgttctggtgggaaacaacatcgtcaacatcagtgcgtcttctctcgccaccgttttgtttatcaaagcattcggcgacaacggtcccaccgtttccactatcgccatgacgatcatcgtgctcattttcggcgaggtcacgccgaaaagcatctcaaaagagtccccggaagcgttcgctatgttttccgcgcccatcatcaacgtgctcatttacgtcttcaaacccattaacgtatgtcttgtgggtatcaaaaagctggtgaaaaagttcgtaaaggtctctaacgaccgtaccatttcggaaagcgaactgctcaccatcgtggaggaagccgagcacgacggcggtatcaacgaaaacgaaagcgagcttatccacaacgtcatcgagttcgacgaccttgaagccatcgatatcatgacgccgcgcgtagacgtggaagccgtagataagacgagcaccgtgcaggaaatcgccgacctctttacggaaacaggcttttcgcgcctgccggtgtatgaggagacgattgacagcatcgtcggcattatcaatgagaaagatttccataacctcgtgctgcgcgacggcaacgcggtgaagcagatcatcaagcccgtggagttcatcccgccttcgatgaaaatttccgcgcttttaaagcttttgcagcagaacaaatcgcaccttgccgtcatcgtggatgagttcggcggcaccgagggcatcgtcacgctggaagacatcatcgaagagcttgtcggcgagatctgggacgaacacgacgaagtggtggaagcgtttcaaaaggtcagcgacaacgaataccttgtcgattgctccaccgaccttgacgagcttcttgaacacttccatttgaagtccgattccgaagcctccaccatcaacggttgggtcatcgagcagctcgatcgcatccccgaaaagggcgactgcttcgattttgaaaacctgcatgtcgttgtagaagaaacagagtaccagcgtgccacccgcgtgcgcatcactgtgtccccgaaaaaggaagagtccgaagaagcataaaatttcataattcataaatcgttcctaattgcgccccgctgtttaacgcagcggggtttcgctttacaaaagcatccgccaaaataatttgcaaatctttttctttccttttaaacaagtttatgctataataaaatcaacaaaaaatattcttgtattttattcaaaattgtaagaatttcgtaaggagtttttaagaaatgctgaagctggagcttttactgcgccgcattcgtggttttgacgcaaagcgcatgatggtgtatgttcgcgacgtcaaaaaggagaccaaaacgcccacacccgtcatcatggcggatatgctatactgcattttgcggtacaacgtgggattttacgattaccacattttcggctttgcgcacatccacggcgcaaaggcgagaagcacattcttcactatgcaggataactggcgcttgacccgcatggtaaacagccctgaagaccgcccctattttgaaaacaagctgctgttctgccgcacgtttgcgccgtacctcggacggtcatttttagacctcaatgaagccggtgaggacgcgcttgccgattttctgcgccaccaccccgtggtgtttttaaaagagccggaaagcttcggcggtctgggggtcaaacgctttgacagcgccgggaccgatttaaacgaccgagaggccgtgaaaaggctgcgcgaaaactgggtgcaaaacggcttactgctcgtggaggaagccttacagcagcacccggaaatgagcgcgctgtatccgtattcgctcaacaccctgcgtgtctgcaccttaacagatgacaaaggcgacgcgcatgtgctgtacagctttgtgcgcacgggccgccacggctcatttgtagataactccacaagcggcgggctcaacgcgctcatctgcgacgacggtgttatccgccgccccgctatgtccgataaaaccggcatgtatttcgacatgcaccccgatacctgcacgccattcataaacttccgcgtgccatattttgatgaagcgattgcgctgtgcaaaaaagccgcgaaggtccgccccaacatgcggtacgtcggctgggacgtgggcatcacccccatcggccccgttttggtggagggcaacaacctccccgcctacgacgggcagatctaccaccagcaggagaaccccggtaccggcctccgccccctcgtccgctccatcatcccggagttttagtttacataattttaaagtcatacgcagaaacccgcattgcagccggaaattccgtttgcaatgcgggtcttttatttttcggttcgttccgcgcgtctggctttgaagaaccggcgcaggattgccgtgcattcttcacacagcaatccgcggtataattcgggtttaaaggcatttttgagcgacgtcaccgacacagccgtgccgcacgcacccatagcttcgtcttccgtgccgaacacgatgcggtccacgcgggcgtttaccgtcgcgcccgcacacatgggacacggctccagcgtcacatacagcgtacagccggtcaaccgccaggagccgagcacttttgccgcctgttccatcgcttccagctccgcatggccaagcacactctgatgctcttctcgccgattccgcccacgcccgatgactttgccgtccttcacaacaacggcgcccaccggcacttcacctgccgaaaaggcttcttccgcaagcgaaagcgcctcgcgcatgaacttttcctccggcacaaacgcgcggtttttcatggcattatacggcatatgtccccttacgaatacagcgtcacgatacacatgacgacaaacagcacatagtagcagatgaaaccgggattcacgaacatccacaacgccttcccgcgtaccggtacgccgcgctgcatgggcgtgcggaacaccttatgaccggtaaaattgcggataagcagcaccacaagcgcaatcagccccaagccgtacacgatatacgtcagcaaattgctcgcgatattcgccgcatccgcgcccacaagcccctcaagggcgatgggcagcgtcgcaagcaggttattgagcatgtgcacgaaaatgttcacccaaatgttgcgggtgcgcacatacaaaagcgccattacaaatcccgccgtaagcaccacgggcaaggactgaatgctgtaatgcgccatgccgaagatcagtgcggagaagattaccgcgggccagtcaccccagcggcgcatgacggccgtcgtcacgctgcgaaacgcaaattcctccgtcaccggcgcgacgagcacgaccgaaatgaacatcgtcagcgcctgcacgggcgtcatcgccaaaaggtctgccgtgtttgcgtcgccgttcagccccgcgccctccaaaagctgtgagatgaggtttgcgggaatgttcatcaaaacgctgacggcaaggcccgcaaagacgagcaaaacactgttcagcacaccgtttttctccacaagcaccgtgtccgagagctttcttttcccaaagaacagaaaaaacgagaacggcagcacaatggataagaacgatgcaatggacgaaataaggtaatacgccgtcggcggaaagtcgccaatggtgttcggccccataaaattcacgccgcacaccgttaaaatcagcgttgcaagcgtcgtccacaaaacctgtatcggcaaagaggtcatggtcgcaaacgaaaggcgggaggccgcgcggcgcagctccttttgctccaaacgcgcggggtccgcccacttcggcggctgtacgggtgcgtaatatacgggctgctgcgccggctgtgcataaacgggcgcgccgttaccgccctgcggcggatatgtatacaccggcgtcgggttctgcaccggcgcgggattctgcggcgcggtatacaccggctgcccgttataaagcggctgcgtcaccggctgcccagcgggcgtgtagttccggttatcgttcatgctcattcatcctttccctttttggttttcccgtttttttcgggctttttcacgtgaaaacggatcatcagcttttccacccagccctttttgtacttgagggaaatgtagccgatggtgctcatcaccagtgcgccgatggcgtccacgatgatgtccttcatcgtgtcctgcaaggctgccttcccaataagcgccgtgccgttatccagcatatatttttgcatgttggtgccgaaaacggaatccatcgtgaattcataaatttcccacaccgcgcccagcgcaagcgcaaagcaaaacgcaaatacggcgatgaacaccggtgaaagattcaacggtatgcgctccgcattgttgaaaatcgcaatcatggaaaagccaagcgcacccagcattgcaccgctcatcgtgtgcagaatcgtgtcccagtgcggtacggcgtagtaaaagcttcgcacctcgccgaggaagatcgcgcagtacaaaaacgcaatgtacaaaaccagcatcacgcgcggaatctgcagcgttttctgccggatgagccgcagcggcagcacaatggcggcaatgcccaaaaggcactgcaaaagcatcagcacataatcttcgtggctgcgcacttcctccgtcccgccgccgtacgacacaatacgtactacaaggtagccaagcggcagaataaagctcagcagcaccgccatgatgaacatgccggtaaagtcccgttttcttttcggcttcatagcccgtcctcctaatgggggtattttttactgtgcaagcagctccgcgacgttgtttgcgtaagcgaccgggtcttcaatggagcggccctcaataagcagcgcctgatcgtacagcacttcggtgtactttttcagcttgtcttcgtcattttcaaagcggcgcagcacctcaaacaccgggtgttcggtgttgagctcaaatatctgctcggccttcaccttctgctccgcgcccggcatggagtttagcaccttctccatctccatggagatcgcgccgtccgtcgtgatgcacacggggtgatttttaagcgtcgtcgaaacgcgcacgtcctttacacgctcgccgagaatcgtcttcatcttctcaagcagagccttgctttcctccgcctgcttttcggcagcctgcttttcttcttcggtctgcacgcgtgcgtcttccgccgcaacgttcttgaagttcttgccttcatactcctgcaacaccatcagcgcgaactcgtccacatcgtccgtaaggtacagcacctcgtagccgcggtcaagcacggcttcggtctgcggcagatgcgcaatgcgctccggggtctcgcccgccgcgtagtaaatgcaggtctggtcttccttcatgtcctgaacgtactctttcagcgtgcgcatcttgcctgtggaggagcggaacagcacaagatccttgagcttatccttgttgatgccgtagttctcgtacatgccgaatttgagtctcaaaccgaaactctcaaagaacttctcgtagttctctctgtcgtgctccagcatggatttaagctccgacgcaatcttcttctcaatgcgcgtcgcgataagttttaactgacggtcgtgctgcagcatttcacgggagatattcagcgacagatcctgcgaatcgacaaggcccttcacaaagccgaagtaatccggcagcaggtctgcgcacttttccataatgagcacgccggaagcatacaactgcaaacccttttcgtagtctctcgaataataatccatcggcgcttttgcagggataaacagcagtgcgttatacgtcgctgtaccctctgcggaggtatggataaccttcagcgggtcctgccaatcgtagaatttctccttatagaagctgttgtattcttctgccgtgatctcgtttttattcttcttccacagcggcaccatactgttgagggtctccacctcaaagtagtgctcatattcgttctccgcaccctccttcgcacgggtcttttcgacctccatgcggatggggtagcggatataatcggaatacttcttcacgagcgaacgaatgcggtatgtatcgaggaactcgctgtacttttcttcctcggtgtcctctttgatatgcaaaatgatctcggtgccgtggtcggtcttttcgcactcgcggatggtatagccgtccgcgccgtcggactcccagcaatacgcctgctctgcgccgtacgccttggattccactcgcacgtggtcgctgaccataaacgcggaatagaagcccacgccgaactgaccgatgatgtcgatatcctcgttcttttcgttttcagacttgaatttcagcgagccgctctttgcgatgacgccgaggttctggtcaagctcctcctgcgtcatgccgatgccgttatcgcggatacacagcgtgcggctgtccttatccgccgcaaggaagatctggaagtcgtcacgattgagtcccgtagcgccgtccgccagggatttatagtaaagcttatcgatcgcgtcgctcgcgttggagatcagctcgcgcagaaaaatctccttatgggtataaatagagttgatcatgagatcaagaagtcttttagactccgctttaaactgtttttttgccatgcaaattctacctctttttcattttgggcatcaaaatcgcgcattcatccgcccatgttctctttctaacaactatactatatatttgttaaaaaatcacgaacaattttaatttggttaaaaaaagaacggttttcttttctttttgcatggcattttctttctaaaggcggcaatgccgccttttaagaaaccccttgatagggtttcttacgaaaaatcgtccggtggacgatttttctattttcctgatctttgggtaggcaaaaggatttcaagctctgcggagctcgaccaaaggtttcacctttggaatctgacaagcttttgaaaaagcttgagcaaaacttttaaccatgctcgccgttagaactctgcggcaaacaaaagaacttttcaaaaaaccgccacaccttcactgccccggtcacggggattctcgcgtccagctcaaacgcgttgattttcaaaaatgccttaccgtccgcctgatacagcatttccgccggcggggcgttgtcattaaagctcagccgtcttccctcggcgtccaccatcagcataccaaacacaaacagcagcaccagcacggtgcagaaaaacgacatcaaaaacgcgcgggaacacacacatttgcgcatgcaaaacacctccgcatgcagtatgccccgtccgttttccgctattcctccgctatgtcgtttaaaaccgccagaatcgtctcgcccagcagctccccggcgtagtccgcctccctttgcgtattcacctctgtgccgacctccaccaaaagcgagccgtgcgtggcgtgcatattgtagtttctctgcgcgaaaaacagcggtcgaaacagccccggatataataaatcgcctttttgctgcaagcgcaaggccaaatgcaggttttcccgccaatccgggaacagcgggtcttccgaaaggtcacaccccgccataatcatgatctgcgcggcattctccccgttcacctccgccacgggcttataccgtgtgccgtcgtcctcctcaccgaacgcgtctctgtgcacatccacggtgatctgtatcgtggggtatttcagcaaattttcctgcatcgcatccattgagcgctggtagctgccggaatacgtctcgtcaaaccttgtcgtgtcgtggatcacgccaaacccgcccgcttctatcacgtctttcgccctttttgccaccgccacaacgctttttccttcttcctccgtgcgaaagctctcgtcgcggtaataccagtccgattcatactgcaagtacgcttccgatgtatgcgtggagtaaaacaataccaccggcgagccgtcccgcttcacgtgcacatcggggtcaattaaaatttcttccgataaatcaagccccgagtccgaagtatccttcacaaaaaagccgtttatctcttctcctccgcccataaaggtcgcggcgaccgctgccgtttcacgctccgggtcaggtgtcggcgccggcagcacgggcagctccgtgtctgttttctcctgtacgggcacaggtgtcgccgtggggagcgatgttgcttccggctccgtttcttttacggtctccttttggggcgcaggcgatgcttccgcttgcggcacttcttggcttgttgccgcctgcaagcccgccgccctaagcgcccacgccgcgccgttttccttcacaaccggccataaattatcccccatgcaccaaagtgacacggccgccgccagcaccgagcaaattctgtatccgatttttccgatccgttcctttcgcatcgcactgcctccatttgtgtggcatatccgtcgtatcatgcttatgatacggcatacaaaattatgcacatgtacacggttcggacgcggaaaattcacaaattcgacattttcacacagcaccaatatgctataataaaatatatcattcttagttttgaacgattttaaaaaactcgcagaaccccaaacgggaaacgaagaaaggatggactgcatggcaagatccgtatactcagaaatcacccccgaaatggaagccctcgccaatctttgcgtgaaaaacggtaagattgacccggagctctatgcaaaatacgacgtaaagcgcggcctgcgcgacattaacggcaacggcgttctgaccggccttaccgatatttcggagatccgctccagccgcatggaaaacggcgtgaaaatcccctgcgaagggcagcttttctaccgcggttacagcattgaagatcttgtccgcagcatgccgagcgaccacagcttcggctttgaagtgaccgcctacctgctccttttcggcgaactgccgagtaaagaacagcttgacgggttcatcaaacagctttcgttctaccgcacattacccacaaatttcgtgcgcgacatcatcatgaaagcgccgagcggcgacatgatgaacaccctcgcccgcagcgtgctgacgatgtattcctatgacgacgccccggatgacatctccatcccgaacgtgctgcgccagtgcattcagctcatcgccatttttccgcttctttccgtctacggctatcaggcgtaccgccactatcacgacggcaaaagtctttacattcaccagccgaagccagagcttaccaccgccgaaaatattctgcgcattctgcgttccgataaacagttcaccccgctggaagccaaggtgcttgacatcgcgcttatgctgcacgcagagcacggcggcggcaacaactccacgttcacaacacatgtcgtgtcgtcctccggcacggatacgtattccgccattgccgcggcactcggctctttaaaaggcccaaagcacggcggcgcgaacatcaaggtcgtacgcatgtttcgtgacatgaaggagcaggtcaaagactggacgaacgagaatgaaatctgcgattacctcacccgcctgcttgataaaaaagcgttcgataacgccgggctcatctacggcatgggccacgccgtgtattccgtctccgaccccagagcacgcatcatggagcgctttgcagagggcctttccaaagaaaaaggccgtgaggacgagtacggactatacatgcgcgtcgcacggctcgcgccgcaggtcatcgccgaaaagcgccgcatctataaaggtgtttccgcaaacgtagacttttacagcggcttcatttacagcatgctcgatttgccgatggagctctatacgcccattttcgcctgcgccagaatcgccggctggagcgcccaccgcatcgaagagctcatcaatgccggtaaaatcatccgcccggcgtataaagccatccaccccgagcgcgcgtttccgggtatggaaagcgaaacctaaagcttccggcaaccgtggttaaaggtttttgatcgacctttttccaaaaaggtcgtggggtcttggggcaacgccccaagtcgctttccgcagaaagcgaaacccttttgcctgccataaatcaggaagataggcgggaacttccagtggacgtttccgccgtaagaaaccctatcaaggggtttcttgaagaactcgccacgcgagttcttcaaaatgaaacatagtattaaagcgcacagccctcaagctgcgcgcttttttcttacaaaaactacgattaaagcaatcaccaaacccgccggtataaccacccaaacgggaaccgtcaccgtctgcggcgagctcgtcaccgtgacgacatattccggcatctcactttctctttccgcgttgccggaggacggaaagctcatgcagatcaagcggcttttcgcgccgtttttcagctcactgccaagcagcacctccgtttgcaggtctttcggcatgaccgtcaccgcatgttcaccgccccacaaatcatcggacgttttcctcgtgtactccacgccatcctgcgggctgaaaggattgagatagtcgttcacggccacggtgatctcatcgtctttcgtaacggacacattattcagctgcagaatgagcaccgtgcggtaattttcttccccgcaaagtcattttattcttcttaactacactctatcaaaaagcgaacggagtgtcaacagatttcaattctcggtttccgtcacaagcttcatcagcagtgttttcagttcttctgtggtctccacggtgtaatccgcgcccgcttcttccagctctccgggttccgcaaagccgaagtacacgccgatgcccggcacgccgcaatttttcgcgccgatcatatcaaagcttcggtcgccgaccatgaaaaacgtattgttttcctttccgcccgcgcggcgcatggcctcctgcatcacttcggtcttatccgtcatggagccatcgagattcgcgccgacaatctggtcgaacagctcaaagatcccgttttgcttcaagatcttctccgtgaacaccgtcggctttgaggtggaaacactcaatttcacacctgcgcttttcagcgcctccaacagttctttcatgccggggtacaagcggttttcgtacacgcctttttctttgtagcgcacgcggtagcggtctaccgcctcaaacgcctgctctttggaaaagccgtagaattccataaaggattcatgcagcggcgggccgatgaactttttcagggtctccatcggctggttcggatagccgtagctgtcgagcgcaaactgcgtgcttttcgtgatgccctcgctgttatcgacaagggtgccgtctaaatcaaacaaaacccaaatactcatcttcttctgcctgcacctccgccatgcgtggagcctccgcctgcgcgcggcgcaccgccgcccgaacggccgctgccaaagccgccggagcgtccgccaccgggacggggaccgcccgagggacgcgagccgctaaatccacccgatctcgggccgccgaatccggggccgcgcggcggacggggtccgcgccagaagccgcccatcggaggcggcgggggcggcgcgccccaacctctgcggtaataccgtctgcgcggacgcagcacgctcagcgcaataatcaaaatgacgaacaaaaccacaaagaagaaccgccagacccgcgagaagaagcgctggaatccgtataaaatcccgccggatgtattattattcgcataattataattggtgttcgcatttgcgttgtttgtcgtacccgtggaatacgagacattgtagtggtcttccaaaatctccaccgcgcgggcgtagacctttttcacgccgctgtcgtactctttcgcggcaaaatcgtcctcaaggtagtcatacagcatcgcgtccagcacgccgccggtaaaaacatcggtcagtcccacgcccggctcggcgtagtaatcctccgcaccgatagaaagcagaatcaagagaccgttattcgctttcttgtcaccgatgccccacttgttaaagaggtcatacgcataatcggcaatgtcctcgccgtcggtgaaatccacggtcgccaccacgacctccgcgccgcaggcttcggcaagtgcgctgcccgtgcgctcaatatagctttccgtcgaggacgaaagcacattcgcgccgtcatacacatagcccgtcggggcatccggcaacgtcacggcaaacgccggcaccgccataagtacgagcaccagcaccgtaagcagcacagcgcccgtctttttcaaaacaggatgtacggtctttgtcataagcatttcctttccctgtccgtttcaaacttttacgcgaacagctccacatcgccgatgcccaccagcttcgccagtgcatacgcaggcgaattgtgcagcgcatcgttgaatgcggcggctttatcgttgtaatcgtcgcgcatcagataatccaagtcggaattgtagttcgacatcagcgattcgcggtacgttgcgtcctcctcattcatgtcgatattcttgatctggcgatacatcgccttcaccgccgtcgtcaggccatttaaagccgcatacttgtccgccgggcgctcggcctttttcaccgcgttctgcgccgtgcgcacggcatctacaagcgtcaagtccgtctcactgtatttttccgcgaccgtcaccagattcgatgcttcggaaaccatcatcgagacctggtccaaaacgccgtacacgtcgtcggagccgtagtattccgccgtcacattgttgcgctcgcgcgacaaagatatacacgcgccgactgggatcgccgccaaaattagcaccaccatcgcaatgaccgccgaaacacggcccacggcttttacgccatcgtttttctttttcataaaaatttcctttctgctttttctgtctacatgcaaattcatgacacgcaaatttaaagtctataaacgcacagccgggcagcactgcaagcacaacccggccggtgttctctttatttacgcgcgaatgtctaaaagcttctgcttcagctcgttttccaaacggccgagctcctgctccgcttcgcggcggcgggtcttgccctcttcctgaattttcacaacttcatcgagtgtcgagatgagcgactggtttgtctggcgcagcgtctccatgtcaacaatgccgcgctcggattcgcgcgccgtctcaatggtgctcatcttcagcttctctgcgttcttgcgcagcagctcgttcgtcatatcggtcacttcacgctgtgcgcgcaccgcatctgcggagtgcgccacgccaagcgccaataccatctggctcttccaaagcggaatggtgttcacaatggtggactgaattttctccgccatcaaacggtcgttgttctgcacaagacgaatttgcggcgacatctgcacggaaaccatgcgggtcagctcgaggtcatgcagcttcttttcaaagctgtcgcactgctgtgcaaagtcgtttgccgcctgcgcgtcctccggcaggccggagcgctgtgcctttgctttcagctcttccagcgtcgtttcgcgctctcttttcaggcgctttttgcccgccagaatgtacatggaaagctctttgtggtacgcaaggttcgtttcgtacagcttatcgagcatcacgatgtccttcatcagctgcacctggtggccctcaagggaagacgcaatcttattcacgttcacttcggccttgtcgtaacgtgccttcatgccatcgaggcggtttgcctgctttttaaagaagccgaggaagcccttttcctcctcgcccgcatcaaagcttttcagctctacaacgaggttcgcgatctcgtcgcccacttcgccgaggtccttcgtgcgcacatttgcaagcgccgtgtcggagaagtttgcaattttcttctgtgcgccggagccatactgcatcacgagcgcagagcttgtaatgtcaattttttctgcaaagtcgtctacgaccttctgttcttcgggcgtaagctgcacttcgggctgttcctcttcttttttctcaggggctgcgggcttttcttcctccacgccgtccagcgtcagggtgggaatgccgggtgcgggggtctccagctcgggctctaaggtcaatttcacgtcgctcatgttgttcgtcctccttatattcaccgtgtgcgtcacacggtcaaaaatcactttgtctgtgttttgcttgtgtcgttcgggtcaaggcccggcattttcatgtcttcgccggaaagaccctcctgcttcaaaatggattccatcacgctgatgtccgccgcaatgtccagcgcatcgtcatcaaacaggctatccagctgcttttcaaacgcgcccgcgatcgtctccatcatgccttcaatctcaaacatcgtcttttgaatgttctcgcccttcactctctggcggctcagcttatcatagctgttcagaagcttcagcgttgtcggcagatagtagttcataaaccggcggatctccgctgctttttcggggtgctccgcgatatacgcaaaaatatcggcagaagccacttccatgcggtcgatgcgctttgtcatcacctcgtccgggatgcggatgttcacgtcacgcagctcatgcagatatttgtagccttcctcaatgatcttgtccacctcgggatcgccggtggagacctttttctgcggctccgctttcggctccggcttcttttcgggctcgggctttttctccggctgtacggattccgccggcacataatactttttgcccttgaaaattttgccgccgatgaaaaacgccgccgcacccaccacaacaaacgtgatgaggtcctgccagcggtaaagcgagccgttcaacgcatacagcatacacacgatgcccgtcagccaatagcggccgtttgagggcttgtacttttcgatcatgtcctgcttgcgcggcgcttttttcggctgctgcacgggcgcaccgttctgcgaaacggcatttcgcggcgctgtgccgcgcggcggattatacggtccgccgggcgcgctgctcggagcctgattcgggtttgtattcgggcgcttgtaattcgagtacgccgtctgtgtgtaggaatagtggtacgtaccgtccggattctgcccctgcggcgactgataatttgtccgcgcgttcgtgttaaacttgcggtttacggtctccgccacacggttcacttcgtttacaacgccgttcaccgcaccctgcacctcgcgggaaatcttctccccatcgaggttattcacgctctccgtcaccttgtcgcccaccttgtggataacgcggtacgtcgcggagttttcaaactcgttttggagcgggttcgtgtaattcgcgccgttcggcgtattcgtgtttttgtgttgttcgttcggattttgtgtgttcgtttttggcaccgcctttctaacggtaatgcttcataaatctccatttttgctgtggtgtgttccggcaaagccggaacacacccacttattcgactttactctattattgtacgtttttctgaaacccgggtcaagaacttccgggtgaatttcagagttttttcaggaattttccggcgcgggagtcggcgttacctgcacggggccttttccgtcctgcacaaggtaatattccaccgtctcttcacccgctatgtgcagcacgttgtactttacatccagcaaaaattccggtgccgcgccgaaggattgtaacgacgcctccgcgtcaaagcgcgtcattagaagctgccggtcggagggctcgcccgccgtgccgcgcagaccgagcacaacacccgcgaaaatcaggattgcagaaagcagccacgcgccgagcggggccatccagtttgcacccgtaagcttgcccagtacactcacgcgtctctttaaaaggctgcgcgtcagtgtaaaatgcagcaccggcaccacaatcatcaaaagcgaaaaaagccaattctgcccgatgatctgcacaagcccggctaaaaattccaacccttttataccggccttcagtcccatgcagacgccgaacatctgccggtataaaaactgcacgaacgtaaagccccaaaggcccaccgtccacacggttaaaagcagaaagttcagcccttttaacggcgtcgtgcgcgaaagcgccagcgcgatgccgccaagtcccagcgccatccacaccttcacgggcgttatgggcatatgcgcaaaatatgcaaaaataaattcactgtataaaaccgataaaaacggaagcagcgatgccaaaaccgagacgcttttctcccgttccgcagcctgataccgcgccatacttcccacctccaaatgcaaaacgtgctgttttcagacgctttgttcacagtatactataaaagcttgaacttttcaatcatttccggcaaaccgaagaaaacgcatcgttttcggcgtttattccgcaaaaaggcgggtattctataggtaacgcggcataccgccgcgcacgctatttttgtagaaaggatcgatccgatatgaaaagaatttttcccgctctgcttgctttgctcttggtgctttcattcacgggctgcgcaagccgaacgaccgaaagctcgtcctcctcatctgccgcaagtgaaaagcccgcgcagtctgcgtcgccttccccggatgtgagtgaatccccgaacgacacctccgttatgccggagaccgcgctcggcctttccgccttccgcgatgccctgcgtgaagcctatggcgacaaatattaccccgatacgaaactgaccgaagatgaaattcgctcagagctcggcatggacgactcgctttacgaagaggtatacgctgaaaacaccgcgcagaaggcccacccggatacgttcatcgccgtaaaagtcaaagaaggcaaaacggacgaagtcaaagagaagctcgcggcttataagcagcgcctgcttgcagatgaagatttcaccgcaagcaaagacaaaatagaggccgccgaaatttacgccgacggcgattacgtattcttccttctgctcggcgagccggaaacgagcggtgaaagcagtgagggcatggcagaggccttcggtaaagaagtacaacacggcatagacgccattaaaaaggtcattggcatggagtaattttgtgtcgaaaagctccataaaacgccccttatattcttgaaatacctccgcctgcgtggtatacttctaatgtatatgcacgcgggcgggcttttttgtccgcctttttgaaaggagctttcatgttcaaagattccgaaaagatccgcgccgccatttttgatgtggacggtacgcttttaaacagcacacccatgtggaataaactcacgttcgcgtttgccgaaaaaatgggcatcgcagcacccgacgacctgttccgcaccctaaacagcctctcgctcgaacagtgcgcggcatattaccacgacgtactccatgttaagggcaccgttgaggaaattcatgagggcatcatcgcactcgcccgcaagggctacgccaaagaagtgcccgagatcaccggcgcggcggcgtttttaaaagcgctctcagagcgccacattcccgcagccgtcgcaaccgcctcggacattgcgtccttaaggcccgcgttcgatcgccttggtatgtcgccgtacatttccgtcatcgaaagctgcaccaccatcggcaaaagcaaggagcacccggatatttatttaaagtgcgcggccgatttaatggccgccccgcatgagaccgtcgtgtttgaagacgcgctctacgccgccaaaacggcaaaagccgccggcttttcggtcatcggcgtgttgagcgaagctgtggaagaaagcgaccgcatagcgcttcaaaagctctgcgaccgctgcatcacagactacacagcgcttttgggcgagcttttgccgcccgaagaccgataaaaaccgtcaaacggacggttctcttttgggaacagaacaggcgcacgcagccgtgtcacgcgaagctctgttttgatgatataaatttttaaaaatcaagctttaggatattttggaggagttatgttcaaaaaatacaaagaaaaattcatcggcgaccgggagttttacgcaaacctcattcgcctcatcatcccgatgatcgtgcagcagggcatcacaagctttgtcagcctgctcgataacgtcatggtcggccgcctcggcaccgaatccatgagcggtgtcgccatcgtcaatcagcttttgttcgtctttaacctcaccatcttcggcggccttgcgggcgcgtccattttcggcgcgcagttctacggcaagggcgaccacaagggcgtgcgctatgcgttgcgcttcaagctcattttcagcgttttaatggccgtcatcgccatcgtcgcgcttctgttcttcaataacccgctcatttcgctgttcctcacggaaagcgaatccggcggcgacctcgtcttaacgctttccgaagcgaagaactacctgttcgtcatgctgatcggtctcataccgttcagcttctcgcaaagctattccagcactctgcgtgaaaccggcgagaccgtatccccgatgaccgccagcatcatcgccatcgtcacaaactttgtcttaaactacattctcattttcggcagctttggcgcaccacgcctcggcgtcgtcggcgcagccatcgccaccgttatcgcaagatatatcgaagcaatctatctcatcatacatacccaccgccgcgaaaagacatttatttttgcacagggcttatataaaagcctgtatttgcccggtgccgtcgtgaaaaagatcctcctcaccggcacgccgctcatgcttaacgagctcttctggagtatcggcaccacgatgatcaaccaaagctactccacgcgcggtctgaccgtcgtcgccgccacgaacattgccggcacagtatggaacctcttctgcgtcatcatgttcgccatgggcaacgccgtttccattatcatcggccagcagctcggcgcgggtgagattgaagaagcaaagcgcacggataataagcttctgttctttaccgtcgtgctgcacatcggcgtcggcgcgctcatcgccatcaccgcgccgtttatcccgctcatttacaacaccacgccggaggtacagcgcctcacaaccgagcttctgttcgtcgccggcgcagcactgcccattcaggcatttgcgcatgtcacgtacttcaccattcgctccggcggcaaaacgttcatcacgtttctgtttgactgcgtatttacttggctcatcccgctgcccatcgcgtttttctgcagccgctacacagcgctgtccatcatcggcatctatgcgctcgtacagtttgcagatatcatcaaggtcatcatcggctccatcctgctgcgctcgggcatttgggcgaacaatgtggtttccgacgttgactgaccccacatgaaggagaatttattatggaacaaagcaagatagaccgcatcaacgccctcgcaaagaaagcaaaaaccgagggcctcaccgaagcggagaccgcagagcgcaaagccctgcgcgaagaatatatcgcagcctaccgcaaaaacctgcgtgcacagctcgataacatggtcatcgtagagccgaacggcgagcgccgtaaattaaagccgaaaaaataagcgaaagaaggcatccttatgctgtataaatacgagatgcacgtgcacgacagcctgtgcagccgccgcggatacaacccgccggaggtcattgccaaggtctattatgaccgcggctacgccggcatgtgctttacaaatcactttttgcagggcagcaccgccattgataaaaccctgccgtgggaggacaaggtccgcgcctactggaacgcctatctgcgcgtaaaggactgggcaaaggataaggatttcgatattctgttcggccttgagcaccactacggctccggcaaagaggtgctcacctacggcatcgatctcgattttctgctcgcacacccgaatatcgacgtcgcgcccatcaaaaactattgcgacgccgtgcacgaagcgggcggattcatctcgcaggcgcatccgttccgccgtgcgccggacatcgaccccaacgtactcccgcagccggagctgttggacgccgccgaaatttacaacgccggcaactccgacgaagacaacagccgcggctatgattttgcaaaagaaaatcatctttacggcaccagcggcggcgatacgcacgagcagcacgagccgaacatcggcaaagccggcatggcgttcccgtaccgcattaagaccgaaaaagagcttgcaaacgcgctgttccgccatgacggacgctgcattatcaacggtgtcattcagcccccgcaagatatttgacccgatttctgaaaggaaaacacatggaatcactcaaggaactttaccgcatcggcacaggtccctccagttcccacacgatggggccggagcgcgccgcgcaccgctttaaagaaaaacacccgcaggcagaccgttttctcgtcactctgtacggttcgctcgccaaaacgggcaaaggccatttgacggacgacatcctcgtcaagacctttgcaccgctgccggtggaaattcggttcgacctttcggataagcctctcccccacccgaatacgctggagctcaccgccattgaaaacgacaaagagatcggctttgagcgcgtcatgagcgtcggcggcggtaaaattctctcggagggcgaaacggaagacgcccccgcagacgtttacccgctttccacattcgccgacatcaaagcttactgcgcctcgcgtcacatgcgcctttggcagtatgcggaagagtgcgagggcacggagatttgggactatttgaaggaagtctggcgctgcatgcgcgaagccgtcacccgcggtttagagaccgaaggcaccttaaaaggcggtttagacgtgcagcgcaaagcgaaaatgctctaccgtcagaatcacatcgatgaaagcgccgaaacgcgcgaaaaccgtcttgtgtgcgcctatgcctacgccgtcagcgaagaaaacgcggcgggcggcatcatcgtcaccgcgcccacgtgcggttcctgcggcgtgctgccgagcgttcttttgtatatgcaggaacgccgcggctttacggatgccgagattctccacgcgctcgcggcgggcggcatcatcggcaatcttatcaagacaaacgcctccatcagcggcgcggagtgcggctgtcaggcggagatcggcagcgcatgttccatggcggcggcagccctcgcggagctgcacggcatggagttagaccagattgaatacgctgccgaggtcgctatggagcaccatctcggccttacgtgcgaccccgtgcgcggactcgtgcagattccgtgcatcgaacgcaacgccgtcgccgccatgcgcgccatcaacgcgctgagccttgcgaatttcctcacctatacaagaaaaatctcgttcgacgttgtcgtcaacaccatgtacgagaccggcagagatttgttctccaaatacagagaaaccggcgaaggcgggcttgcgaagtattatacgggtaagaaataacacaaagcttacgtgaaagcgtgtctaaaagtttttgatccaacttttttcaaaaagtcggtcaggttccaagggtgaaacccttggtcgctttccgcagaaagcgaaacccttttgcctacccaaaatcaggacgggagagtaaacagtccggtgaactgtttactcgtgggagacccaattagggggtctcccgaagagcttgcaaaaagcaagctcttaaaaagaacacatatcaaagagtaaagcgcgcagcctcgaaaagaagctgtgcgctttcgttttatataaattctttactgattcaagatctccataaactcttcgccggtgatggtctctttctcatacaggaactttgcaagctcgtcgagcttcgggcggttctcctgcaaaatccgcaccgccttcgcgtgctgcttcttcacaaggtcaaccacctgtctgtcgatctctgcctgcgtttcggcgctgcacgccagtgaagcatcgccgccgaggtactggttcgtcaccgtctccagcgcgaccatatcaaagttgtcgctcatgccgtagcgcgtgatcattgcgcgggcaagctttgtcgcctgctcaatgtcattcgatgcacccgttgtaacggaatggaacacgacttcctccgcggctctgccgcccgtgaacgtcgcaatcttgttttcaatctcctcgcggctcatcaggtaatggtcgccgtcctccacctgcatggtgtagcccagcgcgccggacgtgcgcggaataatcgtaatcttctgcaccggcgcggagttcgtctgcttcgccgccaccagcgcgtgaccgatttcgtggtacgaaacgataagcttttcgcgcgttgtgagaatagagtttttcttttgatagcccgcaataacaacctcgatgctctcctcaaggtcggcctgcgttgcggaggcacggccgtcacgcacggcgcgcagcgcagcttcgttcacaatgttcgcaagctctgcgccggaagcgccggaagccatgcgcgcgatcttcgcaaggtcaacgtcgggtgcaaccttaattttcttcgcgtgtacacgcaaaatcgcctcacggcccgcaaggtcgggcagctccaccggcacgcggcggtcaaaacgacccggacgcgttaaggcggggtcaagcgactccgggcggttcgtcgcggcaaggataataacgccgttgttgccctcaaagccgtccatttcggttaaaagctgatttaaggtctgttcgcgctcatcattcgtgctcagctgattatcgcgctttttaccgatggcgtcgatttcatcgatgaacacgatgcaaggcgctttttcctttgcctgcctaaagaggtcacgtactttcgatgcgcccatgccgacgaacatctcgacaaattccgagccggacatggagaaaaacggcacgttcgcttcgccggcgaccgccttagccagcattgttttgccggttcccggagggcccacaagcaaaatgcccttcggcatggaagcgccaatctctttatatttattcgggttatgcaggtaatcgacaacttcggaaaggttctccttcgcttcgtcctcgcccgcaacgtccgcaaacttaatgccgtccgaagactgcacatacaccttcgcactgctcttgcccatgtcgaacttcatggcgttcgggccgcccattttcttcatgagctgccgcgacaaaagctgtcccagcaccacaaagagcacaaccggcagcacccaactcacgataaagctcatcagcggggacatctgctccacaatctcgccggaaaactccgcgccggaatcgtaaaggcgctgtacaaggccgtcgtcattcaaaaggccggttttataaattttgctcttgtccttatttgtgaacaaaatctggttgtcttcaatctccacctgaccgatttctttgctctccgtcatcttgatgaacgtgccatagtccacttcctccacctggtgctgtgtaatcagtggcatcaccagcatgtttaaaagcagcaaaacgaccatcgcaatgccgtaataaaaaacaagcggctttttcggcgttttcacttcgttcatgttctctctcctctcgcgcgcgattaaaataggcacgatgttattttagcctattctatgcgttttttgacggaaagtcaatctcaaaatttccaacttttcgtgaacaaatcatgaaagcacgcggatattctcctgcaccgtacctgcgggcagcgctctcctccggtcataataagcagcttctcggcaaagccatcaaagattcccgaaaataatgtcgtccttgccacaaaacagcaccgccgggttgacacttcgccccggcggtgctatgctttttccaaatttacgatttgtatttgcgtttttagggggtattttcatgagcactgttttgattcgtgacgccaagctttccgacgcaccgcgcctgctggaaatttacggatattacgtaaaaaacaccgccatcacctttgagtacaacgtgccgtcgctcgaagaattccgacaccgcatgaaaaacatcacgctgcgctacccgtacatcgtcctcgaagcggacggcaaggtcatgggctacgcctacgcaggctcattcatcggccgcgccgcctacgattggtcatgcgaaatgaccgtttaccttgaccgcaccgccaaaaaactgggcttcggcagaaagatctacgaagccatggagcagcgcctcaaagatatgggcattttaaacctttacgcctgcatcggctatatcgacaaggaggacgagtacctaaaccacaacagtgccgattttcacgcccacctcggttacaaaacggtcggcacgttcaagaaatgcggctataaattcggccgctggtacgacatgatctggatggaaaagtgcatcggcacgcacaccgatacccctgcccccgtccgctttttgaccgatgcacccgacccaaacgcgcattgattttatgcaccccataccttaccgcatggcaagcagcgctgcggacttcttcaatcttgttttcgcgcggtttgcgcaggcggaaagctccgcggcggcgcggcaatcgtccatttttaaaatgcgttccaagcgtaagagggccttttcgtcccactctgccttgttctgcgccgcagcgcccagcagcgccatcgcatccagataaaccttttcgggcgtgcgcaggcggcgcagcgtctttaaaagcgttttgcagtccatctggccctcgctctgcttgtgtgcaaaggcgaaaagctcgtccgggcggtcgtgcagcgtctcgtacacagcctgcaccatgtcggcgctcatcatctcgcccagcacctcgcgctccgtgttttcttcgcccgcaagactcgcgccaagcgccatgctgccgtcttcgctttcaagctcacggtctaagctgtccggcacggcttttttaaagcgatcgccgaggatattattcatcacatacgcgaacagcgtcgggataaaatgcgcctccccctttttgaaaaataaatcaaggcgcactgtgcccttgttttcgccctttgtaatggggctcatcaggccgatgaacgtctcgtgcgtgtactcggtctgcgccgtctctgcttcgccgccgcaaaaagcgcacagtgcgcgcagctttacacccgccgcagcactgcccaaaacgtcctttaaaagaaacgcatacagggtttcctgaaagcgtgcggaaagggccgcgtccgcccacaacacagcaacgctgttttttccgctttcgtacacttcctttaaaaccgcgcggaacgctgtttcctccgcgctcttttcaaataccttcgctgccatatccgttcctccttaaagcgtttttctttgtgctttaaggataaaaaacggttctcggtactatcccgaaacggtctcgattttttctcgattttcgccgaacagcgttgaagaaccgcacattcaatgctataatcgggttatccataaaaaaggaggaaacgcggtggacgagctttataaaatccaaaacgtcacgtataacgccacgggcggtactttaaaaaacgataaaatggtcatcgacctcaccgcacagcaaaaccgcctgctgcgctaccttgtcttaaacgccgggcaaacgctcacaaaagagcagatcaccgcgcatgtgtgggggtatgatgtcgattcggacgtcagcaacctcatttacgataccgtctccgccgtgcgccgcctgctgaaaaaagccgggctaaacggcgccgtcaccaccaaaaccggcatcggctacgcgtttacggaaagcgtcgaaaaaatcaatcccacagccgccaaaaccgaagaaacatgcgaaagcctgccgcccgtttttgcggaaagcgccccgaaattcacgctcgatacggtctatctgctgcttatgggcgacagtatgtataaaaaagcgtggtttttgcagtccgtcggccatgttgaaaagcttccgccgctcagcttggagcccggctcagccgacaccgtcgccgaggacgcgttttacagctggattttacccgaaagcatctgggcacgcattttgtgcacataccccgaagaaagcgaccgcagagcgttgtatggcggcgaaggtacaagcgaactgctcctcgacttaaagcaggattttcaaaacgacagcggctggcgcgggcgtgagcttacacgaaactgcaaaacgtatttggagcgtatgctgattccgagcgtgattgagaccacactcggtgccgtgctgcaaaattcgccgcaactaagcgagctttaccacctgtggcaacggtgcagcgaggaaaacaacgttcatcgcggcgtcgcactcgtcatcctctgcgccctgctcggcgagcggaatttcaaaatgcttgcggaaacctgcgatgtcattgaactgctgaacgaaaatttctgaccgcaatcgccgaataaagtttttgatcgaccttttttcaaaaaggtcgtggggtctcggggcaatgccctgagtcgccattcgcaaatggcgaaacccttttgcctccaaaaaatcaggaggggaaaacggaacagtccggtggactgttccgtttaggggaaccctattaaggggttcccctaacggctctcccagagccgttcaaaaaacaaactatcccatataaaaagaggtgcaaagccacatggaaacccctgttaaaactatcgcccaaaacacactgcatatctgctccgccgcagaagcgctcgctttgctcagaaagcacggcgggcacggcagcgccgcgttcatgcgcagccttgcggatgccgtctcggatgaaaacaaccacatcaccggcactgtcggcgatttcaacaacctcatcgaccgctttgaggcgctcggcgattattttgacgctttgcgcgtgtgtgattttgcacttaaaatctatccccgcagcgcaacgctgctcgccatcacgctcaatacctgcgcccgcagcggcgcggacggcgaaacctatcttgccgcagccgaaagcctcgggcacgaaaactggaacgagccgcggctttttaaagacgccgccgagtattgccgcacccgcgccttgtgctgcccgccggagcaaaccgaagcgtattttgaaaaagcgctctccgtctgccgcgattttcagcgtattttcccgcttgatgagcgtggttacatgaaagaagccaccgtgctgctcgacaaaaaccgcaccgcagacgccgaaaacgtcctgcgccgcgtcatttttgagaaaatcaccgcaaacggccgcccgcagcctttaaacgccgcaaactgctgcaagctgtaccttacggaaattctgaagaaaagccttgaatacgacctcatcctgcgcattgcacaaaagggactttcgttctctgccgccgagcagaattccgagcacatgggctacttcagctaccgtctggcgctcgccaaaacggcgctcgtcattgaaagcgattaccgcaataaggccgatattgaagaagcgctcacgtgctgccagcgcgcgttcgaccttgtgacgttccaaagctacgcggatgatttaaagcgctgctacgtacagctgtgcgaaaacccgcagaatcccatcgacctcaaaacgcaccgccttgtaaagcacgttttaaacaccgcagagaccgcttccgcaccgacacaaaactaaatttaagctttaaaatgccttgttctgtgaaaagaacagggcatttttcttttgtgtgctcaaaatttcgtctgcgccgttcgtagtaaaggtgaaaacaaacggatctaaggaggtttttactttgcctacacaaaacagcacccaaacctacgaaatgctcaaaacatatttggatgagaccgcggacagctttgaaaagctcgatgaggaacccggttttttgtaccgcaaaacggacggccgcacctcgctcgttttctgcgcccgcgtggataaagagctcggctttctgcttttaagcgcctaccccggcattttagtccgcacgtcttacgtgccgatggtcgccgattactgccagcgcatcacgccggaggtcggcgtcgtgtgtgtagaatccaatttgtgcgaggtctattaccgcacggaggtcgcctttgagcacgcgcccgtctcccgcgccacactggagcttttggagcgcaccgcgttcgccgcactcacgccgcacatcagcgctctgcgttcgctcagcgcgggcgtactgccggaggcgctcccggagccgcaggagatccacattccgtctcccgccccgtcccacgcggaagattttctgcccctcatggaggaatattttcaaaaaacgcactttaccgtgcttgcaaaacatgcgcccgatgaaaccggcgcgtgctacctctacgagtttctggccgcgcaccgccgttggaagctgcacgtcaccttaaatgatgagaagaccttttttatcctgcgcctgttccccggtcgcaacgcccttgtttttgatccacgctacctgcacgccgccgcgcagatctgcaacgcggaaaacgattctgtaaagtccggcgcactcttcgtcggccgccgcccggagggtctgtgcgcaaaaatggctctttccgcactggaagttcctacatcactcgaagaaacgctgtattccgccgtttccatcctcgtttcgcttttgtatagccgcgaagcagagctgcaaaaagccgccgcaggcgtgatttttccgacagggtttgatgctgagaagctaaagccctccgcgtcagaccgcaaaaaacggcttgaagacgcgcagcgctttttggccatgaccgcccgcccaaagccgcttgaccccgcgtctgccgaaaaagaattcgatgccctgttcggcggcgacatcgccgagaccgatgacgacgaccccgaaccgttccgataaggaggcccttatgccggattattacattgccgaagacggcaccatccacgaccgcgaagccgagcaccgcagccgcacacagcacaccgcagcccccgccgttgccgataccaccgccgaggagacccccgaagtcagctttgcgcgccaattcgtttactggcttttcgcgctttccgcttccgtctttgctgctgtttgcgtgtttcatgagatgcaggcagcgttcaccccgcccacgcacctcgattttttggaggactacgtacagcagttcgtgtttgaacacgccaaagcgcttgttatcatcctaaccgtattctgcatctgtctttacggcaaaacaggcgcgaaaaaacaccgctataacgtgcttgcctacctctgcaccgtctccatctgctgctttgcgccgcccgccgccgtgttcgtactcatggccgcgcccatccttatggcgctcgcgcttgccgtgctcgtgctcggcatcgtcgggctcgtcaaaatggcgttcggctaaatttttcgaaaaggagttttcccatgaatgcaccgttttccgccgttttccgcacgttaaacggcaccgccgcttcgctttccgcgctgcatgaaacgctccgccgcatggaagcggagacccgcaccgcgctgcgcctgaacgaccaaaacagagaacgccgcgtctgcgccgtacaagacgcaaccgacgagcttttagaagacttcgcgcacgagcacgatacacttaaaggcgatgccgaaagcctgctttccgccgccgagattgcgatgaacgacattctcgatccgcacttccaccgcatgcagccgcagtatttttccgccgccatgcaaaagccgtacaacaccgcaaacgtgtgcgcggaagcactcattgcacgcatgcaaaaagcgctttccgccattcaagccggcgcaaagaaaatcaaaaacgcgtttttgctgccggacgccgcggggctcatcggctccgtttctccggatttccgcaaatcgctctacatgcccatcctcgacgcctacgcgcacatgcgccgctgcgcggaggccatagaaaacacgcctgcgtttaccgaaaaaaccgcccgcgcccacgctgtctgcacgcgcaaaacgcggcagattgaagccgaatgtaccaatcgccgcgcggagattctgcaaaaattaaaggccgataccaacgccgcgatcacccgcacaaacgctgtgctctgcacaccgccaagcgctgcaattttcgccgaaaacgccggacatgccccgctttccctcggcacgctgcgcatcgcgctcccctccggcaaaatgtttacagcgccgcttacctgtacaaagctcgactgcagcgtgctgtttttaacggataacaccgccccgcacgcgctcttttgcagtttggcgttcgatctgcttaaaagcgatcctgccgccgtcgtgcaccttgcagatcccgcccactgcggcaatgcgtacaaggacgttttcgccgcgtttacgccgagcggccgcgcggaaatttggtgcagtgcacaggattttacccgcggcatagaagccttgtgtcgcgccgccgcagaaaatacgccgaactcgatgcactacgtcttcatcgaaaacatggaacagaatatcccggagcagacgctggaagaccttatccggctcatgcgcgccaacacctgcgtgcgcgtgctcgtttccgtgcgcaaggcaatctccctgccgcacggttttcaacagaaattccccgcgctcgtgcaaaacgccgcgtgctgcaccgcaaaaaacggcggaatttacatttccgaagacgtttttaccgtcccgccggaggatctccctgcccgccgcgcagcagcgctttctgtcgtcaccgcgcaggttaaaaaagacgccgtgctgcccctcaacgcccgtttgccgcatgccgaaggttggcagaaaaagagcagcgaagcgggcattttccttcccatcggccaaagcgatgtcactcgtcagcccgtcacgcttgcgtttacggaagaaaagccgtatacgctcgtcatcggcgatgtaaactccggcaaaagcgcgcttctgcataccgttgccttgcagattttcgcaaactacacgccgggcgaagtgaagctcgccattgccgatttcaaagagggcgcggagttcgcgctttatggcgcatcgcgcctgcccgcagtcgaagccgtcgttgaaaacgatgaccccgattgcgccgcatcctttcttcggtactacgtttcggagctgcaccgccgccaaacctgctttacggcgctctccgccgagaccggccgcctcatccgcaagtacgagacctaccgcgccgtgcagcgcgaaacgggtgcgttgtccgaaattctgccgcgcattttgcttatgattgacgaataccagtcgctttttgagggcaacacagagaccgccgcgcttttaagcgagcttgtccgcaaagggcgcacctacggcgtacacctcatcatggcgagccagcgcggcgtaagcgaaagcgcgcgcaacacgttcacggccgagctgaaggatcacttttccacacgccttgttttccgctgcccgcctgccgccgcccgccgccttttcagcgaccgcgcggtcgataccgggcgcgaaaacaccggcattgcggctgccgtgctgctgaaaaccggccacgcgcttttaaacgacgaagcgggccaaaccgagcgcgctgctgtctccgtgcaatgcttttacgccggggatgacctcatcgggcgcatgtgcagcctgctgccacgcgtaaacggcacgggcgaaaccgcgtggctgcggtataacgccgcctcccgtgctgcaccgagtgcactcccgcacggcgaagtcaccttcggcgactccgtatgcctgcataaggaccgcgccgcttccgatgcggatagcttaaaagacgacggccttgtctcgtttacaccgaacggcacgcacattctgtgcacgggcagcgacctgcgcgtgccggcctctgtgctgtgcagcgccgcgcggtttgcggaacaggaagggttttcgctgcatattttctgcgcagaaagtcacccgctactgcggctttgcccggaaaccgccacggtttataccacgcttgccgcacagagagaagcgctttcccgtcagcttcgggaaggtcaaaaccgcgccgtcaacgtgtttttggagatgagcgcggaaaaagaattcacccagccgctcggcacactgcgcccctccgcggacgcggcgcttctcaaaaacgccgtcgcacacagccgcctttccgtcgtgtttgagcgccggtgcaaaatcgtgcgcagcgagctgccccagcttctggcgcttgcgcccatccacattacagccgtcggcgacagcgaaaatctgcgtgccgccctgcccgataccgcccgcattacagcaacagcctttgacgtcccgcaaaaggacagcatccacgcgtattactgtaatcgggatacggaaaaatggggtaagattgtgctgtttcagcctttttccccttgtcaaggacatcttttcaaatctccttgaggtgtcgcaaaaaacagacacctgccctttaaaacctcgttttccgaaaaaatctttgaatgttcgattgacaaattgcgaacgtttgtttataatacgagatagcaaagaaacaaacgttcgtaaagcgctgatatgccgcacagaaccgtctgtaccatgcatcaacgcacaagcgaaactcggatggaggtatttttatgattctgtttctctttagtattgccgtttcctgcctgttgatcgcgcttgcacagggtgcggttttcttgatctctcttgtagcgaaatctgcgcaccgcgcgaaaaacacctccgtgcgccgcagcgtgcagaaatttacggggctgccgaaccgtgaagaagtgaagaacatatattccctttcagaccagtttgcagaccgcctgcgagaggtcgtgcagtcttgactgatacagaatttaacgccgtgaaggcgtttttatccgcctaccactacacagagctcgacctccgtgtacgcagggcggagctcacccggctgacagcgcgcaaagaagcgctgattttggaaggaaataccgaccttctttttcacttagagcacgcgatatgcgcagcaaaagacgccatacgcgtgctttgcacaaggcaggcagaaattgaagccgccatagacacggtggaaagtgccgctttgcgtgagattttgacacagcactacatctgtgcgctcgacctcaaggagattgcagagcgcatgcactactcggaccgccacatgcggcggctgcaccgaaaggcgattgaaagcgtttcgctttccgccgtttcgccctttaaaaagcggggatcctccccgcgcacacttccccttgtcaaaagaatttgagactgccgcggcaaagtcgtggggtctcttttcttttcctgaatttcggcatctgctccgcacggcagacgccgcccgttttgccgtgccgcaccgcggtgaaaacggagactttgaaaaggagttaatttggaatttatgaaaccgactatgttaaaaaccgcttttaccgtggtgttggcagggctttcctcgtactttggtatgctgacgcagccgcttttggtgttgttttttgccatggtgctcgattacctcaccggcatgacaaaagcctatattttctcacagctcagctcgcgcaccggcgtgaagggtattcttaaaaagctttgctatatggccatggtcgccgtaggcgcggcggtggattacctgctgcacggcgcgctgaagcaggcaggcatcgacctgcacatcgagcttttctgcggcctgctcgtcaccgtttggctcatcatcaacgagctcatctcggtgctggaaaacttagccgccatcggtgtgccgggctttcctcgcctcaatcgattactttctcgcctgaaaagcaccgtgaacgaaaaggaagacgaacatgacgcataaaatgaggctgaaaaactgcaatgcctataatgccgaggcccctttgagccttggcacaaagggcagcaaggtcgaaatccggggcgtaaggaggaactatggtaccgattaaagaaaatcttgtgccaaaggacaaatatgccattaaatgcccgtacacccgcacaccgacgcgcgttgtcatccacaacacggcaaacgatgcgcccgccgcaaatgagatctcctacatgcggtataacgaccttgagatctcgtttcactacgcggtggacgatgtaaacattgtgcagggcatcccggaaaaccgcaacgcgtgggcaagcggcgacgggcacggcaaaggcaacatggagggcatccacattgagatttgttggtcaaaatcgggcggcgaaaggttcgataaggccgagcagaatgcggccgagttcaccgcgagtttgctcaaaaagtacggctggggcattgataaggtgacaaagcaccgggactatgacggcaagtactgcccgcacaggacgctcgaccgcggctggcagcgctttttgagcatggtgaaacgctatatggagccggcaaaaacgcccgtcgcgagcaagtttaccccctatctcattcgcaaaaattgccgcgatgcgctgaacatccgcaagggaccgggcacgaactacggcattttagggcagatcaaagacacactgcgctacacaatcgtcgaggaacgcagcggccccggctcccataaaggctggggcagactaaaggccggcggctggattgcactcgactgggtgaagaaggcttaaactcattgcagttgcagcgcacaaattatacatttcaaatgtgacgttatgcgctgcaatggcagatttactcgaacgaaagtgggcactcttttcccctctgccgcttatactggggttaggtaaaaggagggactttatggacagagacgttaagcagaacatagcggagaacacaccgattgaaaatccgccggagggcggcgcggggcgcgaccctttacaggatctctcacccgaggcatgcacatttaaggtgtttcaacagctaaattccagaaccggcacgctgcgcgtgcaggcgtatgcgggacagcggacgttccccgtccccggcgcttcggtgcttgtgacgtacgactttgcggacggcacgcggcggttttctgccggggtgacggacgagagcggcgttttcggcgacattttgctgcccgcgccgaataacgccttggcgcagtcgccgacgggcgagatgccgtatgcgctttacgacatacacgtgagtcacccgggataccgcacggaaatttaccgcgcggtgcctgttttccccggtgtgacgtcgatacagccggtgcagtttttggcggtcggtgaggggtgatgatatgccgagcaatatagacacgcccgttgtgccggaatacatcacggtacaccttgggctgccggaccaaccggccgagaatgtgcgcgtgccgtttgtggcgtacattaaaaacgtcgcttcgagcgaaatctacccgaactggccggaaagcgcgatacatgcgaatattctggcgcagatttcttacgcaatgaaccgcatttacacggagtattaccgcagccgcgggtatgactttgacatcacctcgacaacgcagtacgatcagaagtttattttgaaccgcgatatttttgaaaacatctcgcaaatcgtcgataatattttcaacgattacgtcgtaaagcaaggcacggtgcagccgtattttacgcagtactgcaacggcacgacctcgacatgcccggggctttcgcagtggggcacggtgggattagcgcggcaggggcttgtgccgtatgagattttacagcactactacggcgatgacatcaacattgtgttcaacgcacccgttgggaacaacgaggaatcataccccggtgtggcgttaagactcggaagcatcagcgaaagcgtgcgcgtactgcaaagagagctgaaccgcatcggcgacaattacccggcgattccgcgcattccgcaaatcagcgtgtattacgacctgccgaccgaaaatgcggtgcgggcgttccagaagattttcaatttaacgcccgacggcgtggtgggcaaggcgacatggtacaaaatcaagctcatatacagcggcatcaagcaattaaacgagctgatgagcgaaggcatcacgcccgaggaggctaaacgattctacctgtcggagctgaaagagggcgacagcgggccggcggtggaacagatgcagaacttactgacgatcattgcgtattttgacaattccatccccctgcccgcaatgaacggcgtatttgacgcacggacgaaaaattcgctcatggcattccaagcgcagtacggactggagccgacaggcgtactcaaccggcaaagcgcgaatatgcttctttccgtttatcgcgacacgcgggcgatggcgacggaaaacgggaaatccgtaagtcgtcttatctaccccgggcgggcaatcctcaggggacgcacgggcgcggatgtggaagatttgcaatcgctcatcaaccgcgcagcggcacaaaacgcatttatcccgcaggtcgcggaagacgggatcttcggcgaggcaacggagaatgccgtgaaggccgtgcaagcgcacgaagggttagacgtgaacggcgtcgtagggccgctgacgtggcaggctttgctgcggcttagcgggctttctccgtagtgacaaaatgaaaaagcacgcaggaatttaagcctgcgtgcttttattttgccctaactattactctttgccgataaagatgtattcgcggatgaggatgaggatgccgcagagggtaaggacggcgctttgcagggctcattttatacgaaaaccgtgggaaaagctaccatgtcaacttggaatttccgcaattttgagttgcggcgggcgattttcgggaaattttgcggactttttggggagagacgttattttgcttcgtattctgcgtacatatcgcggacgtagcgggagacgttttcgtcgtaattgggataggtgtagccgtattttgcagcaaaatttttagcggcatctcgaaagagttcgtggcaggtgaaaagcgaccgccatgtgttttccacagaatccatgcgatacgtggaaagaagcgcttgccactgctctgcggggagatactgatcgatgaatttatagtttttgccgacgctgaacgtgaagccgtatgtgctgccgacctgccacgagagcatgcgaagaagttcattgcgcatcatcgcaagcaagtcaatggcgaataacaattcgcggcgacagaggcccttgacaacatagggcgtgatgttccagaactcgttgcagcagtcgtcaaagctgcgggcgccgggcttttgaatgtgatattctttgtctgtaggggtgggcttttcttcgacgcgaccgtctttatcgagcaaaatctcgcgcaggccgtcgccgtttaaatagtcttcaagcgcggtgaggggcaaaatcgtgaggtcaatcttgttgtaatccgtgaagaacatcaagaagctgtacccctcctcgacggcggggaaaagctccatgtcctcgggcttttgcatgatgaggcgctcgccgaagacatttacccatgtgtcgtcttcagtgtagagcgcggggtcatcgacaaaataggtgacatcgaaatcctgaaaacggtctttcgggatgttttgatttgtgcgcgagccttccatgccgacgacgcggatgtgcgcgtcgttttcggcacgggagaggatgagattcatcatttcttcgggggttctttgggtcatggcgggctcctttttatcggtctgcatcaaaaacgatccggaccgttttgttgaagtctgtatgtttttatcagttgtccgtgatcacaaatgacgaagatcaccgatcttcatcatttggaaagtgatcccaaaagttttcaaattctgcgtttgtgatagtgccgctgctgactaaaatttcgtactgctcgccctgccagacgtaacgtacctcggacggggtgtagccgttgcgcaggtagaatgcgcggcgcaggtggcgctggggctcgttttcggcggtagggatgtcgagctccaagtcggcgatgaagcggtttttcgggtacagcgtgtgcatgagctttagcgcttcgctgccgtagccgtgctcacgatactgctcatcgatggcgaaatacagaatgtgcgtgatgccgccgtaggtgagcaggcttgcaaagccgcagaagttttcgtctttgtcgtagaagccgacgaaatcgtggccgtcgtgccgcatgagaccgcaaatgggcgtgcgctcgtttgcggggaacgcgcggacgtagagattttcggtgcggtgaaaatctttagagtgctccgtaatcttttccatgtggagtgcggacatatcaaggttcctttcggtgtttttcggcagcaagctccatgagctcgcgctcggtttcgacatcggcgagggcgggataacgcagcgcgacgcgctcgaattgcaggcggatttttcgcgcggcttcggcgtcgttcccatacagaagcgccatggcatactccgtacgcagggcggcgaggtttcccccattgtgagagcgaaaaagctcccacgcgggcgttttatagactgcggcggacttgtcttccatgaggcagaggtaaacgcagttattgagcagatcgccctgcaatgggaaggggccttctgtgttctgtgcgaaaatgcggtcggcaatctctaaagcctccgtgaaacggtgctcatccatgcgtttgcagtgaagctgaaacgcttcctctgcgccgtctgccatgcggagctcataatcgcgcggcatgtgaagccagtctttcggcatatcgcgcatacgcacgccggagagctcggcagcaaggcggtttaactttgcgtggcaacgtgaaagactttcttccgttttgccggccatgacggcgctgcacgcgtggttgatgtagttttccgtgcgcagcgggatgaaatttataagcgccgaccagaagaagagaaacgcggcttctgaggctgcgcaaagcgcgaggggcactacgcgaaaccgcacggccaaaaacgcggcacaggcggcgaggagcaggttgaaaatgctgccgccgaggtagtagagcttatacggaaaacgtccgttttccatgggcggcggcaccatgatgcagttgagctttttggatgatgtgcggcacaggcgcagctttcccctttgctttgcgagtgtgaaccgaccgaaggagaaggacgaaaacttgtagcccgttaaaagcccgcaaagcaggcgaccgagctcctccgtaaaggccgcgaggtagtacaaaaacgccattaaaaacactaaaataagcgtgacggcggccgcttttccggagctgaaatgccccgggtaaaacgttttttccagataccgaatgcacaaaaggcaagcggcgacgggtatgcaatcgaggacagtcagaatacgggacttgatgaacatggcagcgcctcccctttttctttgattgtagcggaaaaagcacaaaaatgtcaagcaaaaagcgcgtgttcttttgcagtttcttcctttttagggtgaaactgtgatataccgcgtatgtatgcggcatgatatttccattttaggggaaattgatatagccgtcttcaaccgatatgataatggaggcacacttcacaagaaagtgtgcctccaaattcgtttacaggattttcttaaccccggggatcttcttcagaatccacgttaggatgaacgagacaaggaagatgccgagggtcaggccgatcaaaacaaacggactgcctgcgccgtaggggtggaacttcgtgtgttttaaaataccgcgcacaaagatcatgtggataagataaatgccgaacgaacatttatcaatctccaaaacaaacttgccgaaaacgccgggcgttttttcttttcgcggtgcgccggttttgtctgccgcgcagccaaacagcgtaaacacgccgatggactggagaatgacaaaaatggaagaatagctgtagaacacgccggcggcctttacggtgccgttttctttcagcacagtgaacaggacgaccgccgctgtgccgatgaggagaaacagcaggccaagcccgcgattcacgcgccacacgccctgccgcaatgcgtagccgcagaagaggtagaacgggtaaatggcggaaacgcagatataaaacccgacggagatgccgaacgtttttaaaacgggcacaagcgacaggaagatgacgtagacaatcatgaggtagcgcaattcccctgccgtgctgttcgacgcaattttgtggtagaacggcaaaagaagatagatgccgatcatgaggtagagataccagacgtgcgaccacgaggtgccggagaaaatctcataaaagcccgaaagcagcgtttcggcattgacgggctcgtgattgacgaggatctccaatgcgcggaacagaagacagaacacgatgagcgcgatgagcatgcgcggaatgtactttgtaagacattttttcaccgtgacggggcgctccgggtttaaaagcagcgcacccgaaaccattaaaaagcacggcaccgcccacatcatgttgttgacgacgatgttggagaggagcgcctgcatggcagatgcttcctccgggaaaagagacacggcacagaacaccgtgtgcagaagcacgatggcaaggcacgccgcagcgcgcagataagagaacgaatggacgcgaaaggtgtttgcggaagtccctgcttccgctctcatgtggcggctcatcagttgaaaagcgcgcccgtttccattttattgtacatggggtaaatttcctttccgatttagggttttccgttcatctacacgggcatagtcgatatacttgaacgtaccggacataccgtagttgatctggtagccgttgccgtaaccgccgtactcgaagttcgggtcgaacacgtaggtggtgccgttcatgtcaatctcgacccacccgtggcggccgttatacgtgcggatgtagcccgtggagccgtcggcaaggcggacggcgtattcaaatgcagatctttacaagctgatttgattataacgcattttagcgtttgatgcaatttatccgtgcaaatttattgcaaaaagttatcttctgcggctccaggtgtcggggctgaggaggagcaggagagggaaaatctcgagtctgccgaggagcatatcgagcgagaggataatcttcgagagatcgctgtaaatgctgaaattttgtgtggcgccgacaagctcaaagccggggccgatgttgttgaagcaggacgcgacagcggagaaattggtaccgatggaaaagccatccaccgagatgacggcgaagctgagcacgaggatgacgcagtaaatggcgagataggcgttgacgttgtcacagacctcttcgctgacggcgcggccgtccatataaacgggctgcacgcggcgcggatggagcgccttgcgaatggtgcggcgaatgctcttcatcaggagcaaaacacgggaaaccttgagaccgccgcccgtgctgcctgcgctggcaccgatgaacatgagcgaaagcaggattgctttggaaaacgccggccactgctcgaaatcgaccgtgccgtagcccgttgtggtcatgatgctgacgacctgaaacgccgcgtggtgcacggcttcgtagaccgtattgtacatgcggctgatattgatggtgatgagaacgatggagcctgcggcgatgccgaaatacaggcgaagctcctcgtttttgaacaccgctttgaacttgcggagcaagagcatgtaataaaggctgaagttcacgccgaagaggaacatgaacacggtgacgacggtttgcaggaagtagctgtacccgcccatgctgctgtttttaatggcaaagccgccggtgccggccgtgccgaacgcgatgcagaaactgtcgaacacgggcataccgccgagcaaaagacacccaatgcacagcgcggtaagcaaaatgtagatcccgtataaaatcatagcggtttggcgcaggtgcggcgttaatttatcgacgctcggtccggggctttccgcacgcatgaggtagatgccggtgccgccgtttttgcgcgcgccgggcacgactgccaagagaaacacgagcacacccataccgccgagccaatggctgaagctgcgccagaaaaggttgcagcgcgagagcgcttcaacatccgtcaggatagacgcgccggtcgttgtaaagccggagaccatctcaaaaaacgcatcgacgtagctcgggatctggccgcttaaaaagaacggcagtgcgccgaacgcggacataaaaatccacgaaagacccgttgcggcaaagccctcctgcgcggagaacatgcggttgccgccgcggctgaacagcaaaagcgcgctgccgacgagcagaatgagacacagcgactcgatgtaggcaagtatatttctcggctcgtgatcgatgacggcgatgagcagcgggaaaagctgaaaaatgcccgtgatgagcaaaatcaagccgacggtgcggctgatacttttaacattcattgtgcagccgctcctttacacaaaaatgtcgttgaactgcaaaaccggctgctcacgcgtggtaacgacgatgacggtatcgccgagctgatagtacgattcgccgtccggaatgaccgtgttgccgtggtgtgtgatgcaggagatcagaatatttttctttaaacgcaggcgcaggtttttcagcggctcgccgatatacttcgactgcttattgacgatgaactccagcgcttcggcacggccgtctgcaatgcggtgcagcgtgacggcggcacccgtttggtgctgcatggcgcgcacatactgcacgatgttcgcgctgcacagctccttcgggctgacgacgctgccgatggggagcgtttccaccatgccggtcgtcatgatgcgattgacctttgtgacaatgtgcggcacgccctttgcgttgccgaccatggaggtgatgatgttctgctcatcgatgccggtgagcgtgacaagagcgtccgtttcgttgagaccctccgcctccagaatttcctgattggcgccgtctgcgcagatgatcgccgcctccggcagcatctgcgcgagctgttcactgcgctggggattgttttcgatgatcttgacatggacgtccgcgccgatgagcatttgcgcgaggtaatagctgacgcggccgccgccgatgagcatggcgtggcggatctttttctgcgtgatgccgaggcgcttcatgaggtaggaaagcaccgtaaccggcgcggtgacgtagatgtggtcgccgcggcgcagcatggtatcgccggacggaatgagtgcgcggccgtcacggatgacggcgcagacgagcaccttgcagcccagcacgtgcggcaggtgatttaaaatgacgttttcgagcgggctgcgctccaaaacgcgcagctcgacaatctctacacggccttttgcgaatgtttcgcgctttaagaaacccggtaattgcagaaggcggaaaatctcctttgccgcctcgcgctccgggttgatgatgagcgaaaggccgaactcgccgcgcatcatgtaaagctgttctctgtattcagggctgcgcacacgcgcgatggtgtgcagcgtggggttcatttttcttgctgtaagacagcacagcaggttgatttcatcggcgcttgtggcggcgatgagcacttctgcctgctgtaccttcgcttcgttcagcgtggccatggtggcgcagttgcccaccacggtcatgacgtcgaactgctgcatatccctttccaaaactgcccgattggaatcgatggtcacaaggtcgtgaccctcctgtgagagcagacgcgtaagcgcaagacccacttttccgtcaccggcaataatgatcctcatttcttttttcctttctcgaaccgctttcggtatatcccgaaccgaaaactttctaaacacgtaatcctccgcccgggacgacacgtttcccctttgtatcgccatgggtatacatgggtagtatacacccaaagcggtatattgtatagtggcattttgtccgtttttgcggggcggctttcggcgagtttgcggaaagtctgcgggagatgaaatccacgtaaaagcgcagccggtgtgttaaatacacggctgcgctttttactatcggtaatattttttatccgggcgcgtgagggggtgctcaaaacggtggaagagaatgggggtttcgccgcactgcacgatgcggtcggtataatcgcgcgtgaagccggcggcttcaaagaattcgcgggcgcggcggtttccggcgggcagccagaccttgcagatcttaaagccgctgatgtagaggatggcgagagcgtcctccacaaaagcgcgaccaataccgctgtgctgcgctttcggaaggacacacagcgagaaaatttccgcgcagtagggggtgtcggcatcacggcaggcgtaacggcagcaaaatccgacgacttcgccgttttgttctgcggccatgatgtactcgaacccgatctttttatcttcgagcagtttattcgggtcaaaaagcgccggaatatcttcggtcagcgttgtgcgcgcgatgtgtttgaaggcgggcaggtcttcccaatcggcggaacggagcgtaaagctttgcataaaatcacctcggcttgactacgaacgaggccgacggattttacggcttctcccccataaatctttgcggcagcgcaccgaaatttacggtttgcacggcggcgatgatctcctctttccgtgataaaaggcttgcgtcatctatgcgcacgtcgtttaaatcgtacgggccgttgcggaagtggccgacgaccgcgccgtggaacacgccgtcgatgagaagatattgcagtggttcacagtcatacggtaaaccctctgtgagggattttgcaagcgattttaacgccggctcaaacgctttatagagcgggtcattgcggtggagcgcatagacgctgtgaaattcgggcgcagtgtaggttttgagcgtttctgcgtcttcttttaggagatagccgccgtcggactcgaccaaaacggtttcggacacgagtccggctatcgcgagcttgatctctttttcgggcaatttgtaaaacgatttcgccatggcgggcgtgaaccacacaaagcggtgcgcaaaacggcggaggacgattttgagggcttccgttttggtatagcggtcgaggctaaaatcggaaaaaaattcgccgaagcgataccagccgcgatcccactcgccgtcgtactggtcttcgtagatgagaaatgcctcctgcaagcggtgcagggcgggcgtgatctccttgacgagcaggccgctttcctctttcagctgcccgatggtgtacgggccggacatttcgatgcgctctaacagcatttgctgcgtcatcgtcgcgtttttgagcggcttgcggtacagcgctgcgaaaagctcgaggtcttcgggcaagatccagccgaggttgccgcccgcaaagcgccctttgatgagttcacggcggaactggcggcttttattataggcgaggtcgtcgaaatccgcgcggaacgaaagcgtgggcggttgcccaaagccgttccagtagacgttctgcccgggttggaggtcgcggtacaatgcgtcgtattcggtttcattcgccggggtgaggagatgctggcgctccatgcgcagggcgcgtattttttcatcgtacattacggttttcctttcgtttccgcgcgccatattcggcactgttccacgcgtgcgccgtgcggcgtatcgccctgctcgggatcgcatgtatagctccataacaactcacagggcagttccggacattctccgcagtggtaaaagcctttttcctgacagcactgcgccacagggcaggctccgtggaacgggtgtccgtttgtctctatacagccgccgcacccgcagggctctttatacgtacaggtcgtgcaatgcagtccgcatcttgaatcgatcatgtgtgttcctcctaaattatgatattcagatcgtaacacacagaatatgacagcggggtgtcatgttttatagcgctttttcatttttttgatcgcagaacgcattttctttaccatttcgggcggggctgtcacctgcacgtcgacgccgaagctcaaaagccaacgcagggcgtcctccggggtagaaaatccccattcggtgtagagcttgccgtcttcccgcgtgatgaacgacgcggggccgtattcttccacaaggcggtattttacggcgggctcgtaaacggccgtgacaatgtaatcatccgtcatgctttcggtgcggctgcggttcggctctttttcaggcgggacttcacgcggggtgaaaaattcatcggtcacgtttaaattccacaggcggcggagcttatagaggcggaaatcctcgcgtgcggggcaaaagccgaaaacgtaccagtccccccagcggaacacgacgcgatagggctcgacaagcttatccgcctcccctttggcgtaataatagtgaaacacgatgcggcgcgtctcttttacggcgcggcggatcgtctcgatcttctccgccaaatcgtttttgtagaacgacgcgagatcgatctccatgtcccgcggtatatcggtatctgcgccgagctttgcggcgagcaggtcggatgcaggggctttggaaacgctgtcgagcgagcgcagccctgtgaggacggcggaaaactcctgccgcgtgagcacggcggcatcgagcgaaaagccttccatgatggaaataccgccgcccgcgccctgtttggtaaggagcgggatgccggctttgcagatgtcttcgatatcacggttgatggtgcggcgcgacacgccgaatttttccgcgagatacggcgcggtaacagtgcctttttgctgaatggtcgtaatgatgccgatgaggcggtcggttttcattttacgtgcccccctttttatccacagtatagcacacctatgtggaaaacaaaacaaaaaacttgcaatgaagccgaaaatgtggtatagtaccttagaaatcaacaggaacacgccgtctgccaccgggtaggcggaagaacgtgcccacagaaaaccgataggtctgcgcttttaaagtgctcagcaggttttctgcgggcacgttttgttttggagggactatgcgcaaatatcttcgttttgtttcccagagcgttttgggcatgctggggctttccgtctacattttggcggacacatttttcattgcaaattacatcggtgcggacgggttggcgtctttaaacctcgcgctgccgatctacggcgttatcaacggcacggggctgcttatcggcattggcggcggtgtgcggtacacgctgcggcacacgcgcggcgacgaaaacgcagacagcgtatttacggcaagcttactgatgggcgctgttttgtcgtttgtttatgtgctgtgcggcgtgttcggggcggagcatctggcaagattgcttggcgcttccggcacggttttacagccgacaaccgtctatttgaaggtttgctgcctgttttcgccgttttttattttgaataacatcttaacggcgttcacgcgcaacgacgatgcgcccgggcgcgcgatggcggcgatgctgacgggctcttttgcgaatattgtgatggattggtacatggtgtgcgtcttgaacgccggtatgctgggtgcggtgcttgcgaccggcatgtcgccgattttcggcgtagcaatctgcctgacgcgaaagcgcgggtatcacatcgggaagcaccgtatttttgaggaaattccgaaaatttctgcggcgggtttttccgcgttcatcggagagttttcttcgacggtcgttattttggtatttaactatttactgttgtcccttgcgggcagcacgggtgttgcggcttacggcatcattgcaaacgtggcgcttgtggcaacggcggtgttgaccggcgcggcgcaaggcgtgcagccgctgatcagcattgcgtttgcggaacaggaccgcagaacgcttacaaagcagacgcggcgcggcgttgtgacggcggttttactgggcgcgttgtttaccgtgggcgctttgttcttcccgcggcaggtaacggcggtgttcagcaagggcagcgcggagttgacggcgcttgctgtgccgggactgatgctgtacttcttaaactatcttgtgagcggtgtgaatctgctgcttatcgcgcggtttgcggcagcggcgcgcagccgggacgcggctgttttatctcttttgcgcggtgtgatcttagttgtgccgtgtgcggcggtgcttgcaaaagcattcggcattacaggcttgtggcttgccgtgccgacagcggaggtgctttctctgctttgcgggctttatcttttataccgcgaaaagaaaagcgaaaaaacagctttgcaggcggcgtgaaacgcggtataatcttttaaaagacgacgattttggacaaaaggagaccgacatgcacattccgaaaagcgacacacagcacaccgaaattctgacatttgaagaagcgcagaagcaccgcgaagaaagcgccgtttacgaccgcgaaaaatggctttatatcccggatttttactccgaataccgttacatactgggtaccgccggcaaaaagccgctcattaccatcggcatcaacccctcgacggcggagccggataacctcgacaacacactgaaatccgtagagcgcattgcgctttttaacgggtttgactcgtttatcatgttcaatgtctacgcgcagcgtgcgacgaaccccgaccacatggataaggcgtttaaccgtgcgctgcacgaggaaaacatgaacgcgtttcgctgggtgctttcgcgcagcggtgaagagcccggcatttgggcggcatggggcacgattgtggaaaagcgcgactacctcaaaacctgccttgcggacatgacggccatcggcgacgcattccatgcaaagtggtatcaggcaggcaagccctctaaaaagggacacccgcaccacccgctgtatctgcgaaaggactcgaaattggagggctttgacatggcggcatatttgaaggcgctttaaaaaacttgaaaatttaattttgactataaaaaacgctcctcacggttcgtagatcaggtggaagccgaaaacggcaagcctaaacgaactttgaaggagcattttttatgaaaacttttatcccgcacgtgtatttttccgcacccgaagacaccgtaggcgaccttgtgaaccagatccgccgcgagagcgagatccccggcacggcagaaccgaagccggaaatgaaggacagcggcaagaaaaacatcattccaaagacggtcgtttccgctgcgaaaagcgagcttgaccgcgtttatgacctgctgacaagcggcgaagacctgcagatgaacccggacggcacgctgagccccgcctctgccccgaaaaagcgcgcaaagcccgcgccgggcagcgagccgaaagcgccggtgaagacgaaaaaggagatcattccgcacacggtggtctccgcgcccgaaaaggacaccgtgggcgaccttatcgagcagctgcacaaggagcctgagccgcttccggaagaaccgcccgaggaaaaggcagaaacgccggagaagaccgacggcaagaaatccattattcctaagacgatcgtttccgcgcccgtgcagcagtggtacaagacgaacaaggcgctttataacgcggaggtcgccgccatgcgcaaggaattcaacgacccgaacatgcagccgcactttatgtcggacggccgcatgtactggcttgtgaagacccgcccgaacctcggccgcggctttaacaccatgacatacacaatgaagctcgtctacgaccccgaccacccgaaggtgcgctattcttcctccgtgaagccgtatcttgtttcgccgacgctcggcgaattgcagaaaatcgtcaacatgctgccgcacattccgctggacgcggacggcaaaaaactcatcccgcacacgctgacggacaaccgcggcgagcgctatatttgctccagcgacgtggcggacgtacatgcggaagatacctgcaccacaagcgccgtgacctccttccgctttgcttaccgctggctgatggtgtttgagcttgccatccgcaagccggaagcatggaaggattttcaggcgcatgggaagatttaacggaggcttttttatgaaactcttttcgaccccgccggtgctttccggcaagaaaaacaagaagcgcaaaaagcttttgaaggcgcagcgcaaggcgttaaagcgcgccgaccacccgtttgagtccgacaaagctgccgactgccgcggcgtagtgctttcaaaccgcgcgtatctctctgttctgagcgaggtgtattcccgcgacccgttggagacgggcggcattttcttcggcaacatgaaaaacggcgtgtggtatgtggcggaagcgagtgaccccggcgtttacacgctgcacacgcgcgctcaccacgagatggacaataactaccacaaccacatttacccggtgctttcgcgcttatatcggcacgggctgtgccttttggggctttggcaccgccaccccggctcgctcgacacgttttcaagcgacgacgaccgcacaaatcacagctttgccgaggtcatcggaaacggtgcggtttcgatgctcgtcaatcttgaccccactgcgcgcctgacatgctattacctcagtaaaaacggcgaatatcgcaccgtgccggtcatggtcggcgacaaatactttgcgggtaccggctttttggagctgacaacatccgaagcgcttttaaagaacaaagaccgtctgcaagctgaaatttttgaccccgaggaggcttaactgtggaaaaaatcatcatcacacgccgtgagcttatcagacaaattccggctgatctatccgaacatgacagaaccgtgtcacttttaaacgcacttttcgaacgcctgccggaaaatacggaaaaagaggacgttgacttacaatccggcgactttgacgaggcgtttcgtttgctaaacgcgtttgacccccggtttgacccccgcacgtacggcaccgtgcagctcggcgagagcctgcgcgaggagcagacggatacggcaaaggagcacgtgggcgtgctgggactttccgacacggctttacccggcaatgattatgtgggtgaagtgaccggcgcgggcagcgcagacaccggctactactaccttctggctaccgatgagagctatgccgatacgttcaaaaatcccgaccacaccacccgcggtttgatcgtatcgggtaccgcatacacggcgcttttgagtgaaaacgtggtgctgacgggctacgattactttggcacctataaggacggcggctggtttttcaaccgttgcgacgaagcgaaaagcacgctgacggtggacagctttacgctcatccacgaccttttcagtcgcaacacgggcctgtttgaatctgccgagatgctgaaaaagttcgccgtcatcatcggctgcggctctgtgggcgcacgcgtcgctttggagctggcccgcgccggtgtgggcaaatttctgctcatcgacgacgacattttaaagccgcacaacatctgccgccacacgcacggtatgcgcgacctcggccgctttaaggctgaccttctgcgcgaggatattctgaacattgaccccgcagccgaagtgacggctttccgcggcaagctgaaaaacgtgccgctttctctctttgaaaatctcggcaagaacggcattgtctttgcgacggcggatgacagaagcgcgaatgcgcttgcaaatgcgctctccagcacactcggcgtgccgtttattgccgtaggctgctgggcgcgcgcccatgcgggcgaggtgttctaccacattccaaaccgcggcatgaaaacctacggcgagaccttctccgcgcttttaaaggacgccccggcgcgcgacacgcacggcgattattttggcgaagcagatgcccgcgaacgcctccattttgagcccggcacctctacggacatcggctttgtgacactggtcggcgtgaaattcgcgcttgaccttttgaaccttgaaagcgaagcctataccccgcgcgttttgaacgactacacgccgtacacgctcatctgcaacacaaaccgcccggagatcggcggcgaaaacgcgaagatcttcccgtacccgctgtacatcagccgctctattcgcccggcgggtgaagcatgacggacacggacgcgctcacggcttacctgcggcagcttgagcgcataaaggacgactgggacgaccgcaaatacgcggaaatcgaaaaagactgtcttttgccgctttggcagctctgccgccgtatgcaggagaccgagcaggacatttacgcgttcatcttcggcacagagcacgaacttgcgcacatagacaccgacatttattcttgaaagaaggcatcgttatggcaaacggaagcgttgtggtacacgacattgattcccttgaaaaattcggcatggagcttgcggcgcgcagcgcggagctagaatcgctttataatgcgcttacggtgagctgcgcggcacaggaaacaaactggcacgacccgcagtacgacctcttgcacgagcgcgtagagctgtacgccggtgaagcccgcgcacagctgcttgcgctgaacgacgcggtgcagtatatttccgtgctggccgcaaagctgcgcgctttgtgatatgagtgacgtaaacgtattgctctgcgcggtggacagcgccatgaatacgcttgcggcctttgaccgcgactgcgccgatgtgaccgcccgcgtttcgttcgcgctgggctccgtgttggcacgcgtggcgctggaaaccgagcagtgccgccgtgcacttgcagacgcagaagcaactctctatacggacgaagaaaccggcaatacggcaaaaaacccggaggtcgcccgcctgcgcgccaaactggacgccttggaggctctgaacgggcgctgcattttagccggcggtgcgctttccgccgcatggacgcaggaaagccgtcaatccgaaacgcacgtaagcgatgctctgcaccgctgcggcatttatctgaaaaagctgaaccgcattgcactttcacccgaccccggcagcataacggtttcaagccgcagtgacgcgcccgttttcgtctgcattgtggacagcgcactataccccgaaactgccgagcacatccgcgtggcgcaggacatcggctttccgaatatactgacgctggaccgcggcggcgcggcagagcgcagaaaggcctcccttgcgccgatcaaggcgagccgcatctgggaccgcgacgaatacccctgcgcgtgctttaaagagggcggcgcaggtgcgcacgtgatgtacgttgcgggcacagataaccgcggcgcaggctcttacatgggctggcagatgcgcggcctgcccgacggtgcgaaagtgcgcgtgcgcgtgatataaggagaaaactatgcccccgaacactaagattttcacagaccttttaagagaaaaccgcgcatttcttaccgtttcggcggcggaatacggcgcgggccataacgccgcagaagtgtttcgcattctgccggattccatgctcggcgtccttgtttgccactgcgaaacggtctcctgtgcgggcggcttgctgcacctttacggcggcgggcagcttttcgcccgcaacacaaaagacatcaagccgttttctgagttgcttttcctcggcgaccttgcagacggcggccttttcgccgtctcccgcatcgatactgcgattgcaaggcgcggcgagatgttgtttctctccccgggcgcactgaattttgagcctatagggattgacacggcggagttcatccgctgggcgctcgaaagccgcgaagagacgctgaaaggcgtttggctgacaggagagattttatcgccccgcgcgctcaaaaagcacatcactgcaaagcttgaccttttagaccgccttgacatgctgaaaacggagggagacgcatgaaattctctccaaaatccgcagacggctttctttctgccatgatgatggcggaaaacgcgcttctgcgtgatttttcactgagctgccctgcttcgctttttggtgcagagcccatggaaagcgccaaaaaagccgtgaaaagctgcatgacgctttcatcgtttccatgtgcgcaaatgctgaaaacaaacacgcgctacgtgcacgactttgcaaagcgaacgctgaccgtgacggtcaacgcgcggtacatgagcaccggcaaagaggtgaacgacctgcggtgcgttgcggcggatattgcggaaagcataaagcgcggtctgccggaaaacaccgacttttttcaggtgattgcggcttatcaaagctggctgaaacgctttttcgtctacaaaaagaccggtgctacgcgcgaccacgccgctgtggggcttttgcagacgcggcagggcgtgtgccaggcaatcgccgcgctttctatggtgattttgccgcaccttggcattttggcgcggtacgtttgcggcgaaggctactccggtacggattggggtccgcacgcgtggaacgcggtatgggcgccgaacggcacatggcaccaggtcgatttcacattcggcctgcaccgcaaaacgacgccgaacacgtttacgccgcaggacgaccttcactttcgcgagctgcaccgctgggacgaagtagcgcaaagccccgcgctgtttcaaaacgtgcagaccctcgaaaaccgcctgcaagctaagaccgttttgctgttcgcgaacaacccgttcaaggccgagatcggcggcatcccgatgctgtttgacgaacctgtgctgcaaaacggctgcgtgcgccttttgccgctcctcaccctgctcggcggcgggtgcgagctgctcgaagacacgctgcacattgtgctcggcggaaaaacgcaccgcattctgtgcggcacgccgatttcaaacggctttgtgccgataaacgaggtcttagcgcaaagcggcttttgcaccgcagaacggcgcggcggggtggttgtggtgaagcttaaaccatgaccgcctattttttcagtaacaaaaagattcccacgcatgcgttttaaaaaggaactccccgcgatgatgcagagagttccttttttacaccaatttttccagcagcgcgattttctccgcgtcttttttgccgcgggtgttcacgcggtagccgtcttttgcggaggctttgtagacggcaagatactgttttacggagagcagacggtattttgcgccgatttccgtgcgcgtttcgatctcagaaatcggaaccccggcgaaggtctcgagctcctctaacgcggcaaaggagcagtgcacgccacgtttttcaaacgtgtgctcgtgcgcgtcaatcaggcgccaatcctccgcttgcagcagggtttgaaacgtgctccactgctcggaaagccacgttttcggaagcaggacgtcgatgtcatcggcgaaaatcgcctcgcctgtgcggcgccacagtccgagcgagccgtacaaaagcggcgttgctccgcggcggttcagcgtgcgtgcgattttcaaaaacagcttccatttttcttcgttcattttggacaccccttatgttttcgtctgcccgccggaaaacaaaaaatcttccggcacgagcagcataagccccgaacgcgcggttcggcagctttgccattcatgcggaagatttcgcctccgtcattattttcggttgacccggcagacgcgcgcgaatggtcgaattgcgtgtctgcgcgtttactgtaccataccgcgccgggtttgtcaacgcgtttttgcacgcgctgacacttgacattttctccccctctggggtataataagttttatgggacacgcctgcttttaaaacagaacaccgaggtgtagcgcagatggtagcgcgcttggtttgggaccaagatgccgcaggttcgaatcctgtcacctcgaccaaacgaaaggactttgcaaattgcagagtccttttcgttaaagcccgcagattttttgagtctgcgggctttgcttaatcttttacaatcgtcaatttgacggcgccttttgcaaattacgcctccaaataccgtttcagtgcgtccatgcgacgctcggcttcctgacggccttcctcgtacagcgcttttaatttcgccgtgtccttttccgtgtgcgaaacgttcacgggtccctgcgggcggataacgaaaatgcggccttctttctctaagcggtcgatctccctttgctgagcgtcgtagcgcgtcggaacggcgtacagcgcactcaaaaacttcgggaaatgccggaaatacttcgcatacaaatgcagcatagagggctttgtgtaaagcttgcggtagccctgctggcgcgttaagaccagcacgatcttctcaaagccgtcatcgatggccttttggtacggaattgccatggcacagccgccgtccaggtacagctcgccgttcatcttcacggctttcgagagcatcggcatactgctgctggcgcgaatagccgccaaaatgtccgaacaagaacttttttcaaagtattccgcctcgccggttcttaggttcgtcgtcacggcggtaaaatgctgcggcgatttataaaacgtgtcaaaatccatcggcagaatgctgcgtgacaaatcgttaaacaaaaagtcaaagttaaagatctcgtggtgcaggatgagattatttacgccaagataccgcttgtcgttcacgtagtcgatgttaagctttgcggaacgccccggctggcgggaaacgtagttcacgccggtcaaagagcctgcggacacaccggtcacatcggagaaatataagttgtgctccatgaagacgtccaaaacgccggaggtaaagagcgagcgcagagagccgccctccaaaattaaagcaccgttttgcatttttaattcgtccatcacgttttcctccttgacatataaagtgatatgtaagtctaagtttgcgctttttcttattatagcaaaatgcccgatgcctttcaatggaaaaagaagaaaaaagcgcgcaaaacggggaaaaatccgaatcgcacttgcacacttttcatttctgcgttaaaataggcagagcgaaaataacggaaaagaaatgaggataaaattttgagaatccgaaaaaaaaagtgggcgcgcccggaacttgccgcgtgcccgttttatgtgcacgagccgaaaaccgccgccggaacttggggcgagcgctttaagaagcagcagcccatccatttagacctcggctgcggcaaatgcacgtttttggcaaagcttgcgcaccgagaaaaagacgtaaatttcatcggcatcgacatcagtgaagatattttgggcgtcgcccgccgcaacattgaagcggagttcggcgaggagcccgtggaaaacgtaaatctgctttcgtataacattgaaaagctcgatacgctttttgcgcccgatgaaaaagctgcacgaatttatgtaaacttctgcaacccgtggcagaaagccggcgaccacaagcgccgcctgacccacacccgccagctgaacacctacaaaaaggtgctcgcacccggcggcgagctgtggttcaaaaccgacaataccgacctgtaccttgcaacgcagcgctatttagcggaagccggttttgaaattctctgcaaaacggacgacctgcacagcgaagacgcgccgggcaacattcagtccgagcacgaggtgatgttcaccgcagagggcatcaagacaaaagccattatcgcccgctggaacggcaagccggaaacgcccgaaagagtttccacagagcaggcagaaaaagtggaaaacacagccgagtaattcacctgtttggggataaaaaacaagaaagaggtaaaaaattatgtcaaccaaagtcaaaaaccagaagccgctcattattgcggccatcgtgttcgttgtgctcgtcgtcgcaggcgttgtcatctggcaggtcacggcgccgaagggcaccgcaggcgctaaagcctacacgctcaccgttgtcgatgccgacggcaaagagaccgtgcataatctcaacacggacgaagaaatgctcggcgccgctttgcaggatgccggccttatcgaaggcgaagagagcgaatacggcctgttcgtcacaaaagtggacggcattgaagccgacagcgcgaatcaggagtggtggtgtttgacaatcaacggtgaaatggcctccacgggcgttgattccaccccggtcgaagacggcggcaagtacgaattcacgctcacggcggggtattgatttgcgcttaaaacacgtggcactcagcggcattttgggcgcgctgatgtttgtttcgcaggtggcacttgcccctttgccaaacgtggagcttgcctcatcgctcacggtactgttcacccttgcgctcgggccatacgtgggttatacgctcgccgtattcgtgctgcttgaggggttgctgtacggttttgggctgtggtggttttcgtacctctacatctgggcgattttggccgtcgccgcttggctgtttcgtaaaatggaaagccgcctcggctgggggcttctgtgcgggttttacgggctgattttcggcacgctcaccgcgatacccgtgctcattttaagcggccccgcggcgacactggcgtatatcatcagcggcatcccgttcgaccttgtccacggtgtctcaaactttctccttgcctttttgctcctgcctaccctccgtcgcgtcttagcgcgcctgacgagatcgctgaacatgggcacactgtattttgaataattatacgtaaaaagcacgcaggttttgaaacactgcgtgcttttgcttttgaaatcttgaatttacgctctggtcaggtcaaaccgtttgatgaggcgcatgggataggtgtagatctccagcgcggtaacttcggcttgagtgaagacatcattttggaagacgagttcgagcgcgtcctgcagctccgtgatgcgcacaacgctgagcgtacagtggatgacgggcttgtcctccgaaacggcagagaagctgccgatgcctttgcagaacgattcatatttttcgtggaacgcatagtaaaaatcgacaaaaggctttgcgtgtaccggattcaggcacagcacggcggtttcgcggtgcgtggcatacggcggcagaaggctcacagagccgaacgtcagcttttggcgcgtgtgctcgcggacgaactcccctgtccagtcgcagaacgcttcggcatcgagatcttcatacgctgcaagcgtgatatgcggcggccactcggaagacgcatatcccgcgtttgtcatctcgcggcgcagcgcaatcagtttttcttctgtatttttatcaaaacgggcaagcacaacgtatcggttcatcgatcatagctcctttcaaggcttctgttatccgaacaggcgctttaggtgttcggcggaaaaaatggggtctttgtgcagggcatcgagtgccatttccatgttttcggcgctgtattccacctgcttggagtagtctttcgtgcagacgatgcggtcccacggggtgaattcgccggtatcacgcaggcactttgtgttcatcaggcaaatgaaccacacactcacagcgcaaaagcccacgcgcgccgcgatgcggccgtcggtcacaccgtgtgcaaaatggcggtacaggaaatacacaagcaggttttcgtagccgccatccatatcgtcgagattcgcctgcaagccgttatcctccaaaagctgcacgtaatcgggccacgtttcgtcgtagggctccatttcggtcatcatgtcaaacagcgcggcacgggtatcggtctcgtcggtcgtatcgcgttcggcaggcgacatattgccgaacagcgttttctgcgcctgcacgccgaaatcgagcaggcggtgcatgcgcacgcgcagcggcagagagcggtcctgcacgatggcaaacgcttcgtcccgcagatggaacacaagcggatcctccggcacattcggcagctcgccgacattcgttgtgatgaacgtgacgggatttttctgctcaaacagcagtctgcacgcctcttcacagcaaaggcccacgcccatttccacgcggccgccgagctcctcgtaaaaacgtgggtgttcgcggcaaatctcgcacaaagcgtcatcgccaagctttaagatgagctcgcagaggttgtcgtcatcgaggaacgggcaacgctcgttttcgccgaggcggaagcacaccgtgccgtccggcaggtcgcacagctcttcgcgcaggcggtcgccgagctctccttctaaattttcgtaatattcaacggtatcgggatcaacgtcgatttcccagccggcgcagcaggtatcggaacatgcggcggccgtgcagtgaaacgcgtcgtaaaaattcggcttgataaatttcattttgcttttatgtactttacttctctttctcatcggtttcagtcggcgctgcatcgggctttggcagcgtgacttttctttcaaatacaggcttcatgtgcgtggtgaagatgcggcgctccggttccggcagcgcattccccgcttccacgcgctcaatcaagagcttagcggctgtctcggaaaaatcgatcgtagacggcagatactgcatggagtagccgaagttcggcagcgtgttgtcatcgtcaaggccggtcaggtacacgtcctccggcacgcgcagtcctgcagaatgcagcgcctgcagcatggtataatcccagccgcgcacaaagttgatgatcgccttcggcgggacatcccgacgggcaatgtcatgcaaaaacgcattcagcggtttcgtatcttcaatcggcgcaagaaaaatattctcctgcggcaccgtaacgccgaactccttgcaggcgtcccggaagccgcgcagacggtcgcaacccggtctgtatatgggcggatctgccatatacgcaatgttgcggtagccgcgcgcgagcacgtcttttgtaacctcataacaagcggtatagttatcgatatacacgccgtcgcagtggattccttcaatctcacggtctacgcacacaacgggcgtgcctgtgctgcggatgtggtcgagatactccttgttgctaccctcgtcgccgtccacgggcacgatgagcagcgcggcgatcttatacgaaagcagatcgtcaatgagctctttttcacgctttaagctttcgtcggaattacacagcagaagacggtaaccgtaccgctccataatgcggtctgcaatgtaatacatctggctgaaaaacggtgcaaagatctgcggcacgatcacgccgatcatgcgtgaacggcttttggaaagacacaccgcaatagcgctgggcgaataatgcaacgcttccatggcttcttccacacggcggcgggcatcttcgcccacgtagccattgttgttgagcacacgggacaccgtggactgcgaaaccccggcggcctttgccacgtcccgtatggtggcctttttcatattcttttcttccataacttctttgcacggcagtgccgtgcgttctccccttcgaaaaatgatacaggtaaggtatgcggcctccgtgccgcattttgggtgtttcctgctgaaatactctaaaataatattgtaagtttttttaaacggattgtcaacaaatccggcgcagaaaccgcttgcatatgggcaaaatgtttgcaaaaagaagaatttttcataggatttcgcacggcagctcacgccatgtgtaaactttgtatgacagggcacaaaaacgtttgacttttcgccgaaacttgggtatgataaaggtaatcaaaatcgcccaaagtgagacagtgtacggtctctttcagaatgttggcgaaccggaaaggatggtttatcatgaagtgtttgaacaaggtgctcaccattatcggctgcatcaccgctgccgttgccgttgttaccgccgcttttgccgtgctgaactatttcaaggaaaagaaagaaaatgccgagctggaagcgtatcttgaaggttccatccagtaacgaccaaactgatgtaaaaataagcgccgcggagtttcatttctccgcggcgcttgttttttacgcactcacattcaaaaacgaatcattattcattgtcacacctatgcaaaacctcaagcacaacgggcagctgggttttggggttctttacggggcactcgaggctcatgcgggcgttgtagccgataaagtgcagcgcgtggaaaaatgctttgtaatccgcggtatctttcggtgtcatgggtacgcggccgacgggtttgcgatgtgcgtgtgcacaaggatatcgccgcactgctctaccatttccggcgtgccgttttcgcttatgaggtgatagtagtcgcacagcagcttaaagtgcgggtggttgacctctttgacaaacttcaaagcttccggctgcattgtgaaaatatttgtttcctcgtgccgcagcggctccagcgcgatggtgacaccgtacttttcaccggcgtcacctaagatttttgcgacagtttttagttgctcccacgctttttcgcgcgggaagttttccggtacacggcggctgccgccgctgccgaataccccgatttttatgcccgcctgcgccaatcgccctatggcgtgattgacgtatgtttggatcgcttcaaaatcgacattgtcacccgtcagcttaatactgcccggaaacatacagtttgccgcctccgcgtgaatgggtgcggcttcatttttttgcagaaaatccgcgaactgcgcctctgtcatctctgcaagtcccgcaacgctgacctcaagataatcaaacccgagctttgcgataaattccgcctgctcgatcggcatacacacaccaaaccgcatggcaacccctccaaagtctttttctcattgtaatccgtatatgcggaaaaagcaaggaaaacacttgcaaacgcgcataagtttttctataatgaaggcaaatagacttcatttgggaggcttgttgtatggaaaaaatcaaacttggcaaaagtgggcttttggtgccgcctatagccctcggctgcatgcgtcttgcgggcgcagagcgcaaacaggcagatgcatttctgcacaccgcgttggagcttggactcaactttttcgatcacgccgatatttacggcggcggtgcatgcgagcgtgtgttcggcgagatgataaaggacgcgggcgttcgccgcgaagatcttatcatccagtcgaaatgcgccattgtgcccggcaaaatgtacgatttttcaaaggaacacattttgtctgccgtagacggcagcttaaagcgccttggcacggattatcttgacgttttgcttctgcaccgtccggacgctttaatggaaccggaagaagtagcggaagcctttgacgagctcgaaaagagcggcaaggtgcgccacttcggcgtctccaacgaagacccgtacacgatggaacttttgcagagcgctttgcatcaaccgatctgcgcaaaccagttgcaaatgagcctgacaaatgccacgatgatcgcgcagccgatgaacacaaacatctgcgacggcttaaacccggtgctcgataacggcgtgttgaactactgccgcctgcacaacatcaccattcagacgtggtcgccgttccagtacggcttcttcgagggtgttttcatcggcagcgaaaaatacccgaagctaaacgcaaagctcgacgagctggcggaaaaatacaacgtgacaaacaccgccatagcgcttgcgtggattctgcgtcaccctgcaaaaatgcaggccgtcacgggcaccatcaatccaaagcgcctgcgcgactgcgccgccgcgctggacattacgctcgcgcgcgaagactggtacgcgctgtaccttgcagcgggctaccgtctgccgtaaactttcgcttgacaaatgcgccgcgctcccgtaaaatatgggtataaaagggagtagcaaacaggaatatctgtaatgtatgcgtcagcacgacggttccccgtccgtatacgttgtaatctgcgagacttttatcatgctgcggcaggatagaagtctcttttttattttctttcggagacaaggattttgcaaaggcggcaaaaacatccgagaggaaggtatgaaaatgaactttttaagcgagcttttcgcgaacgtgggcaatgtgacgtggcagcacgcggtaatgtggtgcataggcggcgtgctcatctaccttgccatcgcgaaaaaaatggaacctgcgctgcttttgcccatcggcttcggtacaatccttgtcaatctgccgctttccggcgcggtgacgcagggcgaagaagtgggcgtactgacgttattatttgacagcggcattgcaaacgagcttttcccgctgcttctcttcatcggcatcggcgcgatgattgactttgagccgctgctctcaaacccgaagctgtttttattcggcgcggcggcccagtttggcattttcttcacgctgagcatggcgcggctgtttaactttgacctgcacgacgccgcctccatcgcgatcatcggcgcggcggacggcccgacctccatttttgtcgcgaacgtcttaaattcgcagtatatcggcgccatcaccgtggcggcatactcgtatatggcgcttgtgcccattgtgcagccgccggtcatccgcctgctgacaaccaaaaccgagcggcgcatccgtatggcgtacacgcccggctctgtctcaaaaacgaccaaaattctgtttcctgtcctcatcacggcggtcgtcggcattgtgtccaatcgctcggcggcgcttatcggctttttgatgttcggcaatctgctgcgcgagtgcggcgtgttaaacagcctttcggatgccgcgcagaacgtgctgtccaacttgatcaccctgattctcggcatcacgatcaccgcgcatatgacggcggcggaatttttgcgcgtggacacgctgcttattttaggactgggtctcattgcattcgtgtttgacaccgtaggcggtgtactgtttgcgaaaatcatgaacctgtttgtcaagaataaagtcaaccccatgatcggcgcggcgggcatttcggcgtttccgatgtccgcacgcattatccagaaaatgggacagcaggaagacccgcagaacttccttttgatgcacgccgtaggcgccaacgtctccggtcagatcgcgtctgttatcgcaggcggcatcatcttaaacatgatccattaaggaggataacgtatgttcaatgttcccgcatttttagacagcttacagtatatggcaaaaggcatgaccggcgttttccttgtcattgccgcaatcattttgagcatttacctcttaaaccgtgtgtttaaggcaaagtaaaatggatcaggagcgcaaaagataagtttgtcctcgtcggcttcaaagaagctgagtggacgaaaaggatgaaaaagggatgcgtgctgtcaggcaaattccctttttcgagctatgagcaagcgccgcagagttcccgttctctgcggcgcttgttttttacggtttttctttcggctttgcgatggcggccatcaggcagctgaagaagacggctgcggcaatgccggcggcaccggcggtgatgccgcccgtgaatacgccgagaatgcccttttcttttacggcggcttttacgccctcgcttaaaagatatccgaagccgctcagcggcacggtggcgccgcagcccgcgaaattcacgagcggtgcataccacccgagcgcacccaagatcacaccgcccgtgacgtaggccaccatgattctggccggggtgagctttgtcagatcgatcaaaagctgaccgaccacacagattgacccgccgatcacaaacgcccttacatattccatgtgaaaatccacgcctttcgttttatacgttttctttggtttattctgtgcggaataacccaaattatgacgcgcagaataactgtgcaacgttaaaacaaaaggagagtgcagcatgaaaaaaatcgcattttttgatacaaaaccgtatgaccgcacgtggttcgacattctggcaaagcactatgaaatcgcgtactttgaagaaaagctgaaccgccacacggcgacgctgacagacggctttgacgccgtgtgcgcctttgtgaacgaccgtgtggacgcggccgccattgaccgcatgcaccgctgcggcgtgcagcttttggcactgcgctgcgcgggcttcagcaatgtggatatgcaggcagcagcgggcaagctgcgcgtggtacgcgtgcccgcctattccccacacgccgttgcggagcacaccatggggcttttattgacgttaaatcgccgtttgcaccgcgcctacatccgcacgcgcgatttcaacttcagtattgtgggtctgacgggcatagacctctacaaaaagaccgtcggtatcatcggcacggggcgtatcggccgcgcatttgcggaaatctgccgcggctttggcatgcgcgttttggcgtatgacaagtatcctgcgccggactttgagtacgtttcactcgatacgctcctgcgcgaaagtgacgtcatctccctgcactgcccgctcagtgaagaatcctaccacatgctcgaccgcgaagcgtttgacaaaatgaaaaaaggtgtgtttttgttaaacacctcgcgcggcgcgcttattgacagcgaagcacttttggacgcattgaataacggcaccttgcgcggcgcgggactggacgtttacgaggaggaggcgaagtttttctttgaagaccattccgacaccgccgtacaggacgacactttggcgctgctcatctcccgcccgaacgtcatcttaacggcgcaccaggcgtttttgaccgaagaggcattgtataatattgcggaagtgacggtgcagaacctcgatgatttctttgccggaaagccgcttaaaaacgaagtgtgtatccgctgtgcagaaaattgacctgccgcgaacgcacacttttcaaccgttttttacttttctgtggaaatcagggcttaatattccaagccatacggccaatcgaccaagctgccgatgtcgtaaatatgcgtatagccgtaggattcgagcttcatcgccgccataaagctgcggcggccgctcttgcagtaaacaagaatcggcgtatcgagcgtggggatcttttcctccgcggtgtcttcatcaatggtatccaccgggaaaagcacggcgttttcggcgtggcccgtgatgtattcgtcttcgtcgcgcacgtccaagatcacgcagttcggctcggtatcgatgatatgctttgcttcctgaaacgaaacctttttatatgattcttccatggcattcctctcgtcttcactgaaaagccccggggcaggtgctccggggctttgttacggataaacttaacttagatctgaaccttcttgatgatctccttgaggcactcagagctatgtacaagcgcggcatgctcgctctcggtcagcggcaggttgagcttattcacaacgcccttgtggccgacggtggtgagcaggctcaggcagacatcgctgataccgtattcgccgttcagcatggtagaaaccgtcatgttggtatcgatgccggagaggatgcactttacgatatggcaaacggaaatggaaaccgcatagaacgttgcgcccttgcgcttgatgacgttgccgccggacttgcgcatgtaatcctcaacgtccgcataattgagcggcggaatcaacatgccgtcggtgttttccatagccttctggtatgcgtttgccggaatgttggagatgttcgcaacggaccacggcacgaaggagctgtcgccgtgctcgcccagaacgtaagcgtgtacgttctgctggttgatctggtagtactcggagagacgtgcacgcagacgggcggtatcgaggatggtaccggaaccgaggatgcgggactccggaatgccggagcacttgcagaacgtgtaggtgaggatatcgaccgggttgctgacgaacagatagattgcatccggtgcatacttcgtgatgttcggcgtgatgctcttgatgatgttgacgttcgtctgtgcgaggtccagtctggtctggccgggcttacgggcaatgccggacgtgatgatgacgatgtcggaatcctttgcgtcttcatagctgcccgcgtaaacggaacatggcgtgcagaacggaacgccctgacggatgtccagagcctcgccctttgccttttcctcgttgatatcgatcatgacaatctcggaagcaatgccctgcacggtgagggtgtaagcgatcgtggagccgacgctgccgctgccgataatggtaattttattcatagttcaaaccatccttttttcagtatagttgcagaattttggattatcgctttgattatagtatattcaggggaataaatcaagtaattttcggcgttttgggcgcattctgcgggcttttggggattttgtcaaagctgtgtcaagcccgtgcgaaaaagtgaacaacatgcacggacaccgcagtcgtatggcaaaacgcgcatgtctttgtggcgctttttatttattgtagaccttttccatgacgtaggcaatgttcgcgatgccgccgtcctcgcggtggaacatgccgtcaaacttgcgggcatagagaaatttgcgcccgaggaactccgtttcgaaccggtcgtcgtcatcgcttaaaatctcttcgcacagtatcagcgcttcgtctacgatgtacgccggaacagcctgcaaaccgtgaccgccgtaaaacttgtcgatgcccttaagatatgtcgcaaggtggtcgaggcttttcgcatacgtctcgaccgttgtggagcacggcaaaccgagcagtgtgttcgcgttgcaggcgtcgccggaatacagaacgcggcgggcacggtccagatagaccatggttcccacggtatgacccggcacggcaatggcctcaatctgcacgccgccgaggtcgaatatgtcgccgtcctgaacaggcagcgttttcactgcgcacggcggcacaacgtcttcctttttgggcacaaacgccccctccggcttgccgccgcccatcacaaatccgtaacgcttgtcgatgtcgccgtgctcgtacaaaagcgcaacgtccgccgggttcacatagcattccccgtactcaaacgatgcgccggcgtgatccacatgtccgtgcgtcagcacaagcgtaacgggcaaatcggtacattcgcgtacaaacgctttcaaactgcctacgcctgtaaggccatcgataagcagcgctttttcactgccttcaatcaaatagcaaagctcgccgcccagaccgccaatctgcgtaacattgtcaaaaatctttcggcttgtaaaaaacttggacaaaataagcgcctcctccgtaaatttgcggctccgccgcctttttataaagcggctgccgtctgcgccgctttcctgcgtttttcgcttttattatacgatatcgttaaaaaaatgtctataagaaaatctcggcttacgggactttttacattgcatttaaaacagatttttatcatacggaagtactttacggcccttctaacggtaaaccgcgctttttatctgccgttttacgaaaaaaggcaaaaaagctcttgcattttcgggggctatgtggtatgattatgtctgcgttattggagttcaaggcgaatctatgcccaccaatacggttcaggcggtttcgccgtactataatcctacgatcgaggaggtgtctactgtgcccaacatcaaatccgctaagaagcgcgttaaggtcgctgccgcaaagaccctgcagaacaagatgatcaactctcagctcaagacagagatcaagaaggctaacgctgctatcgagtccaatgctgctgacaaggctgaggctgtcaaggtcgctgttaagagaatcgaccaggctgctgcaaagggtattctgcacaagaatacggctgccagaaagaagtccgctctcgataagaagctgaacgctggcgcgtaattttcccaacatcgcaatgcattagacgactgctttcgagcagtcgttttgcattttacggcactttttaaagagaatatgtaaggcagaagcaggctttttcggtctgcttccgccttttttatttttgtgcgttctcctattctaaacgttcgtcatacgaacgcttcaagaaacccaagaccccacaagcttttgaaaaagcttgagcaaaactttattcgtccgcttaccggcagaacttccttaccacaacgactcaataaataccatggcgtacaaaaagatgctgaacacagtcgttatcatgccgatggtaagcccggcgacggcaaggcctttgccccgctgaaagctcttcttaatctgtgaaagccccaatgtagagaacacgatgccaaggattgacagcggcgggaatacacacatcagcacaagcgcgacgcacgaaagcacaaagcccgcgaccgcgtagccgttcatgcggttattcatcggcatcccatacggccggtagggctgcacatacggatttttcggttcttcaaactccgagttcagcgcaagctgtattttcgcttcactgccgcagtttgggcagcagcgcattgtttccgggtacacggtgccgcattcatagcattgtaccatttctccacctcatttttgttctttcccccagtatatcgggttttaatggccttgtcaatgcccgtttctgtccgcggcggacgggcaaaaatgacaaatttgcccatgtgcaaaggattttacgattttatgaaaaaatctttaaatctctattgacaatcatgagattatgttgtatactctcattatcacatagaaggagatgaacaaagtggagtggacacttcccggaacggtgctctccgttgacgcagaccggccgcaggcggcggaggaagttttttcttccctgtttttagccggcgggctggtgctttcgcaggtgacgcaggtcacggggctggagccgtacatcattcaaaactgggtgcggcgcggctttttggcaccgccgaagcagcgcaagtacacgcgtcgccagttgagccgcatcttgatgatcaacgcgttgaaaagcacgctttccatcgagcagatctgcaagcttttaagctacatcaacggtgcgctggacgatgagggcgacgacaccatcgacgatacggagctgtacggcgcgttcgtgctggtggcgggcagcgtgcagaagcacggcttgacctcggaaagcgaaatgaaccgtttgatcgcggacggtctaaaggactataaggagtcgatccccggcgcgaaggaacggatcgaacaggctttgcgcattatgatcaccgcgtggcgcgccgcgcagctgcaaaccaaagcgcagagcatgatgaacgcgctctgcgtgagcgcagattttgaaaaaggagaaatatatgtttgaggaattcaagggcaccgggattcccatcccaacgccaaaaaagccgagcagagactttttaaagaagctgccgaaaatcgcgctcatcgtcgtgatcgtcctcgtactgctcgccgttgtggcaagctcttggtacaccgtgaacgacaaggagcaggccgttgtgaccacgttcggcaaggtgacagacattacggatgccggcttccactttaagctgccgttcggcattcagaaagtggaaaaggtcaacgtgaatgtctaccagaagatcgagctcggctaccgcagcgtcggttccgccgataactttgacatcatcgaaagcgaaacgaaaatgatcaccggcgactacaacatcgtcgacgtggagttcttcgtggagtacaaggtcagcgacccggaaaagtacctctacggctcgtatgacccggaaacgattctgcgcaacctgctgcaaagtcaggtgcgcaacgtggtcggctccgaagccgtggacgccgttttgacgaccggcaaggaatccatccagatgcgtgtcaaagagcttgtatccgaaattttgcaggaatacgacatcggtttgacgcttgtagatgtgaaaattcaggactccgacccaccgaccgatgaggtcacggaagcgtttaaggccgtggagaccgcaaagcagcaggcagagaccgtgcgcaatgaggcgcgcgcctaccagaacgcacaactcccgcaggcggaagccaaagccgacgagctgctgcgcaacgccgaatatttgaagcagaagcgcatcaacgaagcaacggagcaggtcgcgatgttcgaggccatgtacaaggagtacagccagaacccgggcatcacgcgctccagaatgtactatgaagccatttccgaagccctgccggacgtgaaggtgtatatcgatacctccggcgaaaacggcgtgcagaaggtgctgccgcttgaaagcttcacacagggcgatgtgactacgaccgcccccgaaaaaggagaagaataaccgatgaaaaagaaaaccgtgatcctcttggccgtgcttatactggcggctgtgtgcctctttaattccgtgtacaccgtggaggaaaacgaatacggctgcaccgtgcggctctctaaaatcatctcgacgaccgatgagccgggcctgcactttaaagtgccgtttttggacagcgtgaagtccttcccgaaagccaccatgctgtatgatattccgccgagcgaagtgctgaccgccgacaagcagaacatgaccgtggactgctacgtgctgtggagcgtctccgacccgctgaaattttaccaatcgctcggcaacacgagcgttgccgaggaacgcttaaacgcgctgacctacaacgccctcaaaaccgtaatgggcacgctttcgcagtcaaacatcatcaatatggacgacggcgcagcgcgaaacgacatttacgagggcattaccacaagcgtcgatacgcttgccgcaaactacggcatcaaggtcgaggacgtgaaaatcaagcgctttgacctgccggaggcaaacgaaagcgccgtttatgcccgcatgatctccgaacgccagcagattgcggaaaaatacaccgcagacggcaactacgaagcatcgctcatccgcaatgatgtcgataagcaggtgaacatcattgtctcgaacgcggaggccgaagccgcaaaattgcaggccgagggcgaagccgaatacatgcgactgctcggcaaagcgtataacaccgaggataagcaggagttctacaaattcacgcaggcgcttgaagccctaaagagcaccttaaacggcgacgagaagaccattatcttaggcaaggattcggacttggcacagattttgatgaatccgtaaagcctgatagccaccccggcaaaaccggggtggctattcccatataaacgagaacggcacagcccgggaggaagcccaaggctgtgccgttctctattcaaatcacataggagcttatgatctcaaattattcatcgaagatggagacgatctcgccgtctaagatgcggttcatgttcttcaccgcgcagaagttgccgcacatgctgcatgtgtcttccttctccgggcgagaggattcgcggtagcggcgcgccttttcggggtcaatcgcgaggtcaaacatcgcgttccagtcgagcttctttctggcaactgccatttcgttgtcccaatccatcgcgtgcggaacgccctttgcgatgtcagccgcgtgcgctgcaatgcgtgccgcgatgatgccctccttcacatcgtccacgtccggcaggcgcaggtgctctgcgggcgtgacgtaacacaggaacgatgcgccgttcatggctgccaccgtgccgccgatggcggaggtgatatggtcatagcccggggcgatgtccgtgacgattgggccgagcacatagaacggtgcgccgtgacacagcgttttctgaatctccatgttcgccgcgatctggttgagcggcatatggccgggaccctcgatcatgatctgcacgtctttttcccacgcgcgcttggtcagctcgccgagcgtgatgagctcttcaatctgcgaagcgtcggtcgcgtcctgcaggcagccggggcggcatgcgtcgccgaggctgagcgtcacgtcatattcacggcaaatgtcgagaatttcgtcaaaatactggaagaacgggttctcctcgccggtcatttccatccatgcaaaaatgatggagccgccgcgggaaacgatgttcatcaaacggcggttgcgtttaaacttcttcgccgtctctttattgatgccgcagtggatggtcatgaagtctacgccgtcctccgcatgcatgcgcacaatgtcaatccactcgcgcgcagtgattttgccgagcgccttgtggtagtaaacgaccgcgtcatagatcggcacggtgccgatcatcgccggacactcgtgcgtcagcttgcggcggaacttctgcgtatcgccgaaagagctgaggtccataatggcctccgcgcccatttcgaccgcatgattcactttttcaagctccatgttaaggtcggtgaggtcgcgggacgtgccgagattgacgttgatcttcgtcttcagcatggagccgagaccgttcggctctatgcatgtatgcaccttattgcacggaatgatgaccttgccctccgccatgagcgccatgagttttttcggctccaagtgctctttttcggcgactttcgccatttccagagtaaaaatgcccttgcgggcggcatccatctgcgttgtgtattccattttctgttcctttcctaatgcgtgtttcggaacaaaagaaaagggcatgtgataatgacacatacccggatatttccgttccctacgttggcattatccaaatcaggttattcgggtcgagggtcacaccctcctctcagcccgtatacaagcaccccgtttattattttttgcgttttccgcatatttactctaccacgccaaatgcattttgtcaagattttgcctgtgttctcggcttagtgtccgcgcacgttgatctctttctcgctcaatttcgaataaataagctgctgtccggaataaagactgaaataacccgagaacaggaagcttacaagcgccgcgatcatgcagaacagtgcgctttcgccgccgaagagctctacgctgagcagaattgtcgcaatggggcagttcgtcacaccgcagaacagcgccgctatgccgacggccgcaccgaacgcgggactcagaccgacaagcagcgccaacgtaccgccgagcgtggcaccgatgaacagcgtgggcacgatctcgccgcccttaaagcctgcgccgatcgtgatggaggtaaagattatcttgagcaagaatgcctcgggacgcacgacgccctcctcaaaaatgcgctcgatgacgtccataccgccgccgttatacgcgcgcgtaccgacaagcaatgtgagcaaaatcaccacaacgccgccgaccgccgcgcggagaaattcgtttttaaaaagctttttgaagagctttgcgccgctgtgcatcgcccagcagaacagcatactggcaatcgcacacaaaacggcgatgacgagcacacgccacattgtggaaatgtcaaatgccgggacattttcgatgaagaaatgctctggggcgacacccataaccagtgccagtgcataggcagacgcagaggacacgatgcacgggaacagcgccgaggtgcagaagcggccgacgctgacgacctctatcgcgaagacacatgccgccatcggcgtgccgaataccgccgcgaacacgccgctcataccgcacatggtgagaatgtggcggtcttcctcatttaaacggaatagcttgccgaagaacgtcgccacgcttccgccgatttggagcgccgcaccctcgcggcccgcggagccgccgagcaggtgtgtaatcgttgtgccgaggaaaatggccggcgcaagcaaaatggaaacacctttattgctgcgtacaccctcgaacacctcgttcgtgcccacgccggaaacgcggcaaagtttataaacgcccacaatggccaaaccgccgacgggcagcaaatataaaagccatgggttagcgccgcgcatggccgttgcccacgcaacggattttgcaaacagcgcgccgacgaagccgccaagcccgccgacaagcaagcctaaaacgccccaccgcaaaaacgccgcaatgtacgcccacacgttttccgcaagcgagcgaattttctctttgttctccattgttctttcctcactcagttcatgtctttattgacaaataaagtttttaatcaactttttttcaaaaagttggtcgagctccgcagagctcgaaatccttttgtctaccaaaaatcaggacggaacttccagtggacgttccgtccgtgggagacccaattagggggtcttccaaaaaggcgaagccttttagaatttactttctcacaaaatttattttctcacaaacaaaacgcccagcgtgttcggaccgcagtgactcgagaccgtgcagccggcataggtctccaacacctcgtcgaagccgccgcattccttgatgattgctttcacattctccacaatctccggcgcacagcccgagtgcgtgatgaaaatgcgatttcgtctcaaatcgtctctgccctgcaaacgctcgcgcacatactgtgcaatgcaattgtcgatcttgccgcggtactttttgcccacgcccattttgccgtccttcacttcaatgcacggctttagcttcaataaattcgcgccgagcgccgccaaggtagagcatctgccgcccttttgcagataaaaaagtgtatcgatgacgaagctcgcctctacttttttcgccgtttcgcgcatgagcgcggcaatctctttggggtcctcgcccttttccgcacgctctgcggcatccaaaacaagcagcgcgatgcccgtggaaagattgcgagaatcgaccacatacacgttttcaaactccgccgcagcggtgcaggcgttctggtagcagctggaaaaatcactgctgatattaaaatggatcaccgcgtcgtaattttccctgcattttttgaaaaatgccgtgtaatcgcccacgttcacggcagcagtgcggcacacgcccttgccggagcgcacgtagtcgaaaatctcctgcggcgtaatgtccatgccgtcgcgacaattctgcccgcccttttcaatgtacagcggcgtaatgccgatattatacgtttcgataagctccggcgacagatcgcatgtgctgtccgccgaaattttaatcctcattgcagaattctcctctccgctttcgatttgttttacggtgtttatgttgtttcagtatacaacagcccgcgctttttttcaagatttcgcaccgtttccggcatgatttttccgtctctttcataaattttaagacattcttacattgcgcaaaaacgcttgcatctaaagaaatttttcgctacaataaaatcacaaaacaaagatgagaggagaccgtatatgcaaggtcaaaattacaatccctacaccggcgcaccgctttccggcatagatccgcccgccgggtatccgcaaaaaagccgtatcgcagccggactgttcggcatgctgatgggcacattcggcgtgcacaatttttaccttggcaatacacagcgcggactgatccagattttggtcgctacgctcggcgcgcctctcacctgcggtctttccacagttgccgtgtgggtctggagccttgttgagggcgtgcagatcttagaaggcaagattaaaatggatgcaaacggcatcaagctgaaggactgagaaaggagatttttatgacagacgaaaaaagcacccggaacactaccccggagaccgcaaagccggagccgaccttgacgaatcccgtagagcagagctttgccgaagccgagcgccttgcggagcaggcagaggccgccgcaaaagacgaaccgtgctgcgatatgccgaaagccgaagaagctgccccggaagcaccgaaaacggaggtgccaacgccgccgcagtatcagccgccgcagtatacctatgcggcctacaccgcacagccgcagcagcccaccccgcaggagggtgcgggcgactaccgccccccgcgctacacggagcagtaccaggcgaacgccaataatgcaaattataacaacccgcagcaaacctactacgccccgaacggccagccgcagtatgggcagaactacgcacagccgtatgactcgccgcagggcaccaaaagccgcattgcagctggtgtgctcgccattttattcggtgtgttcggcgtgcacaacttctacatcggcaaaacgggccttggcattgcacagcttgccatcaccgtttgcagctgcggcacgcttgccatcgtctccgaaatttggggcatcatagaaggcgtgcgccttttgcagggcacaatctatacggatggtcacggcatgaagtttgttgactgagcttgattttataccattgactaaaattccaaaacagcaaaacccgatgcagccgaatccagactgcaccgggttttctctgttctgttatgacgatataaacgcgtttcttatttgaccggcagccagacacgcatctggttttcgccgcggtttgcccatgtgtaatacgggataaggcggattgtcttttccacaaatttcggagcctttgtggaatacagcgtgtcgatgtcctgctgtgcacagcctgcgatctctacgggcacaatgccgccgagcgtttcgggctcgaaatcgagcgccttcggctctgcaccggctttaacatacagcggcagcaccttgccgttatcgacttcctctgcgcagtagacgagcgcgccgcgctgtacgcacaccttgccactgtccgccgcgatctttgcggaggcgtacacaacgtgcggggtcatatccatggtgagcgcaagcgtatcgccgtctttccatgcgcgggtgatgtaagcgtaaccgtcctttgtcacggcgttaaggtcaaccgattcgccgtttacggtcagcaagctcttttcgctccatgccggaatgcggatagcgaccgtcgtttccgcttcgcccttaatcgtatactttgccgtgccgccgtgcgggaaatcggtctcgcaggtgagcgtgatgcccttttcggtcttcaccgtgccgcctgcatagaggtcaatgaagaacgtgtcttcattttcgctgtacgcataggagccaaaggaagacaccatgcgcgccacgttcggcgggcagcatgcgcaggcataccactgcgggcgggtgggcagcactgcgcggtgcgtgacggccttgccggaaatgcccggtacgacctcaagcgggttcacatagaagaaacgcttgccgtcaagctgcatgccggcgagcacggtgttgtagaacgcgcgctccatcacatcggcatattcgccgcggtgctcgttttcaagcatcttcttcgcgaagaacatcaggccgatggaggcgcaggtctcggcgtacacggtgtcgttcggcaggtcataatcgaccgtaaaggcttcacccataaacgtggagccgatgccgcccgtaatgtacatgcggcgctttgtgatgctctcccacaaattgcggcaggcagcaagcagtgtctcgtcctgtgtttcctttgcgacgtccgccatgccggtgtaaaggtacacggcacgcacggcgtggcccacggcgtccttctgctcacgcacgggcagggtgctctgggtgtagtcggtattcagctcctccgtgccgtcccaaacgttccagccgcggttcttcttttcttccacgaaataattcggggcctgaccgcgcacgtctacaaagtgctttgcaagctccttatacttttcgttgcccgtggcgcgccacagacgcatcagtgcgagctccacctccgggtggcccgggtaggcgcgcgtgtttttcttcatgaattgctcgtaaatgcagtctgcattcttcgacatgatgtcgagcagctcgcgcttgccggtgacctcataatacgccacggcagcctccatcatgtggcctgcacagtaaagctcatgtgcatcgcagatgttcgtccacattttgtcgggacacttcacggtgaaataggaatcgacatagccatcttcgtgctgggaagcgccgtagagctgaatggtctcgtccacggccttttcaagctccgggtcttcacccgctgcaagcgcatacgccgccgcttcgatccactttgcgacatcgctgtcttggaacaccataccgtagaattcgtccggctttacgtccttgcccctcagcttttcagctgcaaggcggatattttcaatggcgtggctcttttcgatacccgggatggcgtcgttcaggatatcatactgatacggcagcacctcctcgcgcacgagcttctgcattttgccgatgaaaccgttatcggcggaaaaggattttacggggatacgttcgcttttcatctttataaacctccatcatgagtctcaagttgtccgtacatcttttatagcacattcaaccggagaatgcaactgttttcggaaaacttttattttgatacggaaagttcatgaaaaacggttgcaattttcacgcgttgcaggtaaaatcaaactataaaattttttccgagaaactcgaaccaaaaaaggatgcgtgccgcatggccataaagataaaagggaaacttccgcttaaaatttgcagcgtgctgttcgttttgtacggtgcagcgtcgcttgtggcgcttctgctgtgcctcatcgaccgaaaatacgtggaggaatacgacctttccgcttactttaattcctccatgccggtgctgtccgttgcgggcgcgatgcttgtgcccgttttgctgctcattgcgggtttgatgggccacgcccgagcagaccgcccgaacagcatgaagccgtgcttttttctgggccttgctaccggcatcatcattcttttcaatgttttgtatgagattttcaccggcgatgcgccgaatatgccggaaatctgcacctatgttctcgacctcgttctccccgttctctacacgttctgtgcatggctgaactggaggcacaagggagacgacacgccgaaagccgcagatgtcgaccccgcacccgcttctaaatcctgatcgttccctttagataaaaaactcaagcacgcagaactttcgagtctgcgtgcttttcttttggcttgttcggttttttaaaaggcttcgccttttcgggagaccccctaattgggtctcccacgtaaaaacagtccactggactgttttcactcccgtcctgattttgaggcaggcaaaaagatttcgccatttgcgaatggcggctcagggcgttgccccgagaccccaccaactttttgaaaaaagttggatcaaaaacttttacgtcgcttcgctgtcgttaccgcgggctcgtcagttcatcagcgctttatagatttcgcctttcttaaatccggagagctttgcggcctccttagcggcgtcgctggcggagctgccgttttccatcgctttttttgcggcttctacggcgtcctctaacgtcatttctttcttttcttccgcctttgcgccctcgatgacaagcacgaattcgccctttggggcgttctgctcgtagtattcggcagctttatataatgtcgtgcgcacacactcctcgtggattttcgtaatttcccttacaagcgcgatgcgtctgtcgccgaatacctccgccatatctcttaacgtatacggcagcttatgcggcgcttcgtagaacaccatggtgcgcacttcgtttttgacggactccaagtggtccttacggctctttttattgacgctcaaaaaaccctcaaacgtaaatctgcccgtcggcagccccgataccgccagcgcggaaatgacggcgctcgggcccggcacaacaagcaccggcacgtcgtgctcggcgcacaacgccacaaggtcttcgcccgggtcggagatggccggcatgccggcgtcggagacgatggcacacgtttcgcccgccaaaatgcggtctacaatgcgcccgcccttttcggccttgttgtgctcataatagcttacaagcggctttttaatgccgaagtggtttaaaagcttcattgtgacgcgcgtgtcctccgctgcaatgaaatccaccgccgccaaggtctccgccgcgcggggcgaaaaatccgacaaatttccgatgggcgtgcccaccacatacaatgcaccgcgaagcagtttattttcttccatctgcgcgtcctccctcgtgaccgaatttgtaattcccgtaaatttccagcatttcggcggaaaacccgccgttttcgtcttctataataagtgtcggcagtacggaaagccccggtttgccgccgcgccgcgcttccagtaaaaacagagacggcgcggtgtttatcctttgctgtacgagccgcagccgtttcggctctaagccgtagcttctaaaaacattcattgcgtccgcaaggcgctccgggcgctgacataggcaaaaccggccgccgaagcgcagcacgtctctgcccgctttcgcgacatcttcaagcgtgcaggtgcactcgtgccgcgcgttttccatgcgttcgtccgggttgcgcagccccgcgcccacggccttatacggcgggttacacgccgcaagatctaacgttgggtgcggaatgatttttttgatctcccgtatatccccccgaatgacctcgatattttcttcatacccgttttccgaaacggagcgcaaggcctgcgaaaacgcctgctcgccaagttccaccgccgtgatgtgccgcggggcgtaatttgcctgccacaaaagcggaatggtgccgcagcccgtgccgaggtcaatgcagcgctctttgtgcttcggcgcggcaaaatgcgccagcaaaatggtgtccgtattaaacgtgtgctcgcggctgacgagtacacggcaggcaggcgcaagcggctcccagtgcagattttccacaggttttctccttttggttgaatttagcttccgataaacatggtcaaaaatctttgattaaactttcttcgagaaagtttacgaatttcaaaggcgctgccgtccttttaacagcaaaagaaaaaggactgccgcttgggcagccctctcttttacgcaatgtcagcgattatgcctgctccggagcggaaaccgggcaagtgtcagcgcaagcgccgcactcgatgcaggtatcagcgtcgatctcgtacttgccgtcaccctcggagattgcggaaacaggacatgcgtctgcgcaagcgccgcaagcgatgcaagcgtctgtaattttatatgccattttaggacacctccatgtatttgatacctacattctaacacaaatccatgaaaatgcaagcgaaaattgcttttttacagatacgtaacaaaagcccgccaaaatacaggtacttttagttctccagcttcttaaattcctcaatttccttcttattcaacttgatctgcccgtctttcagcacgcgtacgtccttcactttgtagacgctcggcgcggcgtccgggctcttatcgagccgcacggtcagttttccggtaagcaggttctggtcgataacaacgcccttgccgtccggcgtggaaaccacagcgttcaccttcggcgtggtacgcagcaggtcaaggtatgcctcctgctcatatttcaggcagcacatcagtctgccgcacgtgccggagattttcacagggttcagagaaagcccctgctccttcgccattttgatggagaccggctgaaagccgccgaggaacgagccgcagcagaacggtctgccgcagatgccgaggccgccgatcatcttcgcttcgtcgcgcacgccgatctgacgcagctcaatgcgcgtgcgaaacatgcccgcaaggtcttttaccagctcgcggaagtccacacggccgtccgccgtgaagtaaaagaggattttactgttgtcaaacgtgtactccacgtcgacaagcttcatctcgagtccgcgctccgcaattttcttttcgcactgcgtgaacgcattttttgctttcagttcattttccgccacgcggcgcaggtcgtcttttgtcgccttgcgaatcacttttttgagcggctgcacaatggaatcatccgcaacatcgcggttggccatcgccacttcgccgcactctacgccgcgcgccgtttctacaacgacgtggtcgtcggcggagagcttctcgctgttcgggtcaaagtaatacaccttgcccatgttcttaaaacgaacaccgattacttctgccatatttatatccacagcccgtaaagggcttcctttctttccgggaaaaatccgtattgttattttgacaacacggacgatttttatttcaaaacaggctttatttgcccgcagtttctttcatttcggcgcacagcgccgttacaagcagcgccatgttcgcgtttcgccgccagtattccgtgtattttgccgtcatttcgcacagcgccatcagcgcttttaaagacagcttgcgtcttaatttgtcgcagacctcacgcgcgggcacctgcacatttacattgtttttcagcaggcatgcatcgcgcagcaaaagctgcaagcgttccatgctttccgggaataagggcttgtctttgataagcggcgcggtcgccgccaaaaggtcatgctccgtgccggaaacgagcgcgtttgcaatgtcttccgccatttgctccgcttttgcggcgcggccgttttcgccgtccgaaagcattctgccgatgttgccgcggtgcagagatgcaagcttttcagcttcctccatgggcatgccggtcttgttctgcacgtaaaccgctgcttcgctttcctccggcgggcgcacggtgaaaacctgtgcacgcgagcggattgtcggcagcaaagcgtccgcagaaagcaccgtaaagatgaaaagcgcgcctgtcggcggctcttcaataaccttcaaaagcttattctgggtgatctccggcatgggattttccgcaaaaatgcagtagacgttgatatccgcttcctccggctttttgtatgcgtcgcggatgacttcgtcgacggatgcgaccgaaatcgtgttcgatttgccgctgcccgtaacaatgcggatatccgggtgcgagcctgcttttgcgcgaatgcacgccgggcatacgccgcagggcgcgaaatcgcggtcttcgcatgtgcagaccgccgcgcgggccagaatctgcgccaatgtgcgtttgccaagccccgcttcaccctgtaaaagaagagtatgcggcagcctgcggcgcgaaaacgccgccgaaagcgccgttttcagagccgcattccccgcaaaaccttcaaactgcattaaaccttctcaaaacggtctacgttcagcacgaaaatggtagagccgcccacggtgacttccaccgggaaagaggagtacatgcccacatccatggtggaggtgctgggcacaacctgcgttctgcggcgggaatgcttcgcgatgataccgatgacttcatcgaccttttcgtcttccacaccggagatgaaggtggtgttgccggccatcaggaagccgccggtggtagcgagctttgtgacggagaagccgcctcttgtcagtgcggaagagaccgcaccgctgtcatcgttgctgacaatcgcaaggatcaatttcataatatttcctccttatcgcgttttttgaaacgcatattcgttattttttgagatcgacgaagacaggctaaacgagccgttaaaagtctctctatccatcgcttttctctctatttgtattttaacatcttgccgaagaaaaatctataccttttttggcttttgggcaatttgttttgcaaaaacctgcggcgttaaaacaaaaagcgccgggacgttcaaaagcgccataaggccgttaaacgcatcacatacatttaaaatgccgagaaacggcgacatgcaccccaaaaagcaggaaagcgccgaaaacgccatgtatattcttttttccgccgcgccttttttcggcaataaatacagtagcgcgtccataccgtagcagctccacgccaaaaccgatgcaaacgcgaaaagcgccacgcatacgccggcagaaagctcgccgaagcgccccaaaacgagcgaaaacaccgaaagcgccgcttccggggaaaaatcaccaacgggtgacaccagcatacacagcgccgtaattgtgcacagcaggattgtgtcgataaacacctgcaaagcgccgagtgtaccgatctgctccggggtcttattttccgtgcggaacgtcgcgaatgtaccgctgccaaggcccgcttcgtttgtgaacaccccgcgcgaaatgccctcacgcatggctaaaatcatgccgcctacgccgcccgcaccggctttcagcgaaaacgcacctttcagcatattccgcaccgcgccgggaatatggcttccgcgcagaaggagcaccgcggcgcacaacgccaaaaacagccccgccatgaacggcacaagcttttccgtgacgcgcacggctttcggcaggccgccgcgcacacaaaggagcaaaagccccgcaaacacaacgcccgcaagcacgcgcggcacacccatgggcaccagcaccgacgatgccgcgccggtctgcgccatggtgcccatgccgagcgccgaaagcacacagcctgcggcataaatttttgcgccgtgccgcccgaacgccttctgcacatagccgatcgcgccgggggcgtttttcgtgccgaattttgccgccaaaacgccctcggcatatacggtcatcatgccgaaaaacgccgcaatccacatccagacgaccgcgcccgcgccaccgaccaggattgccgccgcaacacccagaatattccccgtgccgagcgagccggcaagcgacgccgtcaaggactgaaatgcggaaaatcccccgcagcgctgcgtgccgcacagtgccccgcgcgtcatgcccggcagctttgtcacctgcatgaaccgcccgcgcagcgtgaaccacacgcccgcaagcaaaatcaaaagcagcacgtgcggcccccacaaaaccgctgtcaaaacacggacaaacgccgagaagctctcgttcacagcgcgcagttcatctcaaggtacgcacacactgcgcgggtgagcgcttcggcaatcacggtgatattacttttaatccacgcttcgtcctcggcgttgtcgtggtacgcgatctctacgaggaccgccggtgcgctcgttttcgtgatctccgcaagacgtgtcgtcgccactgtgctcacaaggtcggggtcggggtagattttccgcagttcatcggcaataagctccgccgcgcgcttgccggacgcgctgtacgggtaataatatacgtccggacctcgcagctttcccgccaaatttgacggcccggcgttcgagtgcagcgccaaatgcaaatcgtaattcccggcgttcgattcgcgtatcgcctgcccaagcgacgtgttcggcgtgttgcgcacaacattgatgccgttttgctccagcatgggcaccatgtcgtccgcgatgcggttcatccagtactgctcatcgccctctgtcaaatacttattgtacggctgaatggacgggcttaaatagattgtcggcataagaaccctcctacatcatgctttcaaaatgtgttcaaaaaacgactcactgttcacacccgagggacgcaggtagcgaccgaggtaatataagctttccggggcacgcgtaacggtgctgacacgctcctcacacgaaagcgtgaccttaaacccgaggtttttgatgatctccggctctcccttactcactgcgccgaacggatacgcaaacagaacgggcttactttgcaggttttcttctgctttctgctgaaaaagcgtcaggtcttcagtgagaagcttcgtgtagtcttccagagattccccggaaagctgctttgtgccgagccgcgcaccgtccgagctgtgcaggtcatacgtgtggttcgcaatttccaccacgccggaagactgcatttcgcgcagcatatcccatgtgcagtgcgcatagtacgggcttttgtccggcgtttcggtgtagaggtcggcgtattttccgatgggcgaaagcacaaatttcatgccgtaccgctttgcggtgggataagcgtataagtagttattgtaatacccgtcgtcaaacgtcagcaaaatcggtttttcaggcagcgcggcgccgttttccgtgtagtttatgaggtcttcggataaaattgccgtgtagccgttttccgaaagccacttaaaatcgctttcgagctcctccggcgaaatgacgtatttgccaaggcgcgacgcgtcgtccataacggcgtgatacatgatgaccggtacgcgcacgccggggtcctccgccatgaccgttaagatcgcaccgagcgccccgatggtgccgagcgtcagcgctgcggccgccgttctgcgcagccacgcgggcaaaaagcgataaagcgcaccgacgctcggcacacgatgcgaacgcaagctcaaaacgccgtacatacaccttccctcctttgtgccatatatacgcgccaaaagggggttatatgcaaaagccgcgctctgcacagaggataacatccatgcagagcgcggtttttcaaagtttataaagctttataaagccctgtattttatttttcggctttgaccagaagcatcatcgggcggcgcagctcgtcttccatgccggggacatccatcaagccttcgggcggcacggcttcctctacggctttaagcgtaaagccgctgttcagcacgcccattaaaatctgctgcagcgtgtgatgctgtttttttacgatgcagccgaggaaatttgtgacccgctcgcccggcatgaaatactgatcgatcggccagtaaagtatttttccgtcttcgctgtaaatccaatcctgatcgacacctgccgtaaatgacggatgctcgatattaaaaagcagcgtgccgcccggctttaaggttttataaatcttcctgaaaatggtgtccagatccgcaatataatgcagggcaaggtttgaaatcacgcagtcccatgtgttttcggggtattcatagtcttcgataccgcaaagacgatatgtgacggctgcgcttctcgtgcgccatgcggctgactccagcattttctcgctcaggtcaatgcccagcaccgctttggcaccctgctcagcggcataacggcagtgccagccgtaaccgcagccgagatccagaacggttttgccctcgagcgccgggaacagcggccgcagctgatgccactctccggcggcctccaggccgtctacgctgcgcgccatttttgcgtattcctcaaagaatgtttcgttgtcaaattcgctttcccttttgtgtttctccattttgcacactccgttttctcaccggtcttttggataattataacacggtttttcatgcggcgcaagattggcgctctgcaaaagccgagcagccgccctgtccggaaaaccgggcaaagaacggctgctcgcttggcttttctattttcaaatcacggggaactctgcgttttcttccggcatgtcgtcgtatttttcggcggctgccgcttcggtctctttttcttcttccgcagcaggattttcaacggatttttccgtttctgtggaaactttagactctgcttccgtctctttttcggaaaccggctcttccgccttcggcaggtgcgacgagaagaaagtatacaggtcttcgtagacctgcgcactgttcatctcggtgatgagcgcgtggcggatgcgcgggtaaagcgtcagcttcacgtcgtgcccggtcttgttcaatttatcaaacacacggcgcacacccttgcccatatcgcccacgggatcgttttcgccggagatgagcaaaatcggcaggtctttcggcacacggcggtaccactggtcggtgttgatggcgtacaaaagcgtgccgaggtcgatatacccctgcaccgtgagcgggaagccgcacagcgggtcgtttacaaagcgatccacttcctcttccttactcgtcacccagtcgtaatttgtgcggttgggcttgaatttcttgttgtacggacccgtggcgatcttctcgagcgacggaattttcgcccgtgcgccctttgcctttttcagcatattgaggtacgtgcgctcggccttccacatggcagtcgaaatgcccgcgctggtacccatgaataccaccgccgtgagggagttgccgtaggcggccgcaaattcgcgcgcgatgaacgagcccatgctgtggcccatgagaaaatacggcagctcgggatatttttcgcgcatgatgctctgcaaattgcgctgatcctcgacgacattatagaggccgcccttttcgccgaaatgcccgtagagcgcgccggaggtcacactgcggccatggccgaggtgatcgttgatgacaacgacaaagccgcgctgcgccatgtattcgcaaaacggtttatacaacgcactgtgctccgccatgccgtgcgaaatctgcaaaacagccttcggttcgccgtccggctcatacaggcgggtgaaaattttgttatgtgccgtgctggaatcaaatgtaaattcggataccttcatgcagcttaatcctttcggtttgtgattttatagaaaagtcaattatcaaataattaccgtaaacacgctcagcgtatgcagcacgctgccggctaagacaaacaggtgccacacggcgtgcatgtacggcacttttttgccgaggccgtacagcaccgcgcctacggtgtacgccacgccgcccgcgatgaggcagtttaatcccacacccggcatttttgccgcgaccgtattaaacgccagtacgacgacccagcccatcatcaggtagcagatcatcgaaacgaccttgaatttctccatatcgacggcgtttaaaacaatgcccagcaccgccgcagcccacacggccgcgaacatgacgatgccctgcctgccctcaatgcagcacagcgtgatgggcgtatatgtgcctgcgatgagcagatagattgtgcagtggtcgagcacgcgaaacacctttttcgcgcggttcacattcaacgcatggtaaagggtggagaccgtgtagagcaaaatcattgtgccgccgaaaatgctgacgctgacaacgttcacaagactcttttcgcagaaccataataacataacgagcgccgccgcaccgaacagcgcgcccacaccgtgtgacacagcggagaagatctcttccccaagcgaatacagcggcaaagacagccgcattctgtcttccttatgccaaacctttcttgcaccgtaaccggcgtatgccgtctgcatatccatacgtttcaccctttctccggggacctgtcccggttctttattttaaaactgttttttatttttcttttatatagttttcaataccagatatattcatattataatctgcatgtttcaaaatagcaagggggtatttgtaaattttcttcgcagacgcccccaaaactgtaattttcagtccatttagcgctaaaaagtctattcggctcccttgttgcacgctcgccgtacacaaaacttatattttctaacaaaattttcgctcaacacgattgactttttgtatctgtgatgttaaagttaaatcaccgtcatactatctatgggttcggaaagccgtgtctgtttccgggctcataccgtaaaaacctgtgtgttcatggcgttcggcagcgggacacaaaacaagcggtttttgcggcatacacgctgtgaagggctcgaagctttggcttcgacccgtttttctgtgccgatactaaacacccggcacagtgtgaggtgcgcaaaaagatgtccgtaccgtcggaaaaccgcgcgggcaagaagcagcttgaggtgtggccgacttctccttttttgtttagacaaaatgcgcaccggaaaggcaaccggtatattgtgaaaaaggaaaaacgcacgaccattctgcggttttactcctttacaaagggactgcgccacaattttgtgctggcgctgctcaccatggcgatctcggtcttcgccgggtacatgacaccgcagatcattcgcgtgacggtagactccgtcatcaacgattccccgttcaacctcccctcgtttttggcaacacagatcgaaaacatgggcgggcgggatttcttacgtcaaaatctcattctatgcgccttggcgtcgcttttgttcgcggtgctcgcgggcatttccacgtacctttcgcgcatgaatatggcaaagggctgcgagggcaccgtgacgaaaatccgcaacacgctgttttcgcacattcagcgcctgccctacgcatggcacaacaaaaaccagaccggcgacatcatccagagatgcacgcaggatgtcgacctcattcacaactttatcaacgaccagatgatggagcttgtgcgcgtggtttttctcatcgttgtctcactcgccctgatgttctccatgaacgcaaagctcgcgcttatcgcctttatttttatcccgatcgtcgtggggtattccatgatcttcttcgtcatcgtgggtgaccgcttccgcattgcggatgaagccgaaggcaagctgaccgccatggtgcaggaaaacctgaccggcgtgcgcgtggtgcgcgcgttcggccgcgagcgttttgaaaaagataaattcaataagcagaacgacctcttctccgacctctgggtacgcctcggccacgtaatgggcgtcaactggggcatcggcgacctgctttccggcattcaggtgttgacaatcatcgccgccggcatcgtgttcgtcgtgaacggcgccatcacggagggcgagtacctcgcgttcgtcgcgtacaattccatgcttgtgtggcctacacgcagcctcggtcgtcttttgagcgagctttcaaaaaccggcatcagctccaagcgtatttttgaaattctcgacgcggagccggaaaaagatgcggaaacccccgttaccccgcccatggaccgcgacattgtgtttaagcacgtcaacttctcctacggcacttccggcgaagtgctgcacgacattgacctcaaaattcccgcaggcaccacgctcggcattttgggctccacgggcagcggcaaaagcacgctgacctaccttttagaccgtctatacgagctgccggaaggctccggcgagatcaccatcggcggcgtggatatccgcaacatcgcgctttcacacctgcgcggcaacatcggcattgttttgcaggaaccgttcctgttctcaaagagctttaaggacaccatttcggacggttccaatcgccacgatattgaaagcgtgcgcaaatatgcccgccttgccgtcatcgacgacaccatcgaccgctttgccgaaggctacgatacgcagatcggcgagcgcggcgtgacgatctccggcggtcagaaacagcgcgtcgccatcgcccgtatgctcatgcagaacacgccgatcaaaattttcgatgactctctttccgccgtggatatggaaaccgacgcgaagattcgcgaatccatcaacaaaaacgtgcgcggcacaacgattttgatcgcccaccgcatcacgaccatcatgaatgccgaccagatcattgtcatggataagggtcgcatcgtgcagcgcggcacgcacgaaacgctctcgaaggaagacggcatctataaacgcatttacgacacacagcgctcggctacttaagccgcgcacggggtatttaccgatatgaaaatcaaaaacaaatccttacaaacgtgggcaaagctgcttccgttccttgccccgtataagtggcagatgattttaatcatcgcattgatgatcctcggcgcctgttttgacatggtgcagccgcttttttccggctacgccgtggataatttcatcgagccgcgcacgacggaaggcctcattcccttcacggccgtttacctttccatggtcgtcgtgcagaccattacaaccattttaatggcaatctacgccttaaaggttgaaatgtacttaggccgcgacttaaagcgcaagcttttcgaccatttgcagacgctcgacttttcctactacaacacaacgcccgtcggcaccattatggcgcgtttaatgagcgataccggcaagatcggcacggttttggcgtggagccttgtggatattttctggagctccatgtacgtgctcggctgcgttgtcatcatgctgttcgtcaactggaagctcgcactcatcctcatcgcgattatcccgatcatcgccgtcatcacggtcgtgttccagaagaaaattttggcagtgaaccgccgcgtgcgcgccatcaatgccgaggtcacccgtcattataatgaaggcatctccggcgcaaaaacatctaaaacgctcgtcatcgaagaaaagaacgacaaagcgttcgaaaaagtcgcggaggacatgcgctccacaacgatccgcgccgtgcggttaaatgccgtgtatattccgatcatcagctttctgaccgccatcggcgtcgcgatggttctgaatcagggcggcaacatggtgctgttcggcgacatcaccgttggcgaaatgaccgtgttcatcaactatgctttgattattgccgacccggtacagcagcttgcgcgcaccatctcgaattttatttccacgcaggtcaacattgagcgtgtctccgcccttttggagcgcgagccgctcatcaaagatacgcctgaagtcattgaaaaatacggcaccgtattcgacccgaaaagagaaaactgggagccgattcaggggcacatcacgtttgacgacgtgacgttccgctacccggacggcgtagaaaacgtcttagaacatttttcgcttgatattcccgccggcaccacggtcgccattgtcggcgaaacgggcgcgggcaaaagcacgctcgtcaaccttgcctgccgcttctttgagcccactgagggccgcatcctcattgacggcaaggattatcgcgagcgctccatgctgtggctgcactccagcatcggctacgtgctgcaaacgccgcacctcttttccggcagcgtgcgcgataatatccgctacggccgcttagacgcgacggacgaggagattgaggccgctgcaaagctcgtcagtgcacatgacgccatcatgcacatggaaaacggctacgacagcgacgtcggcgagggcggcgaccagctgtccaccggcgaaaagcagctcatctcgtttgcaagagccgtgctagccgacccgcgcatcttcgtcttagacgaagccaccgcgtccatcgataccaaaaccgaggagctcattcagcacgccatttcgacgctgcttgaaaaccgaacctcgttcctcattgcgcaccgcctctcgaccatccgccacgccgaccttattttggttgtccgcgcaggcaagatcatcgagcagggcacgcacgaagagctgcttcaaaacaaaggctactacgccgatctctacaacaaacagttcgagcaggaaaacgtgaagcatgtgtttggggaataatacggtgtgttcctaaaaccaccgatttttcggaacatgaaaagaccggcgaaaaccacagcgttttcgtcggtcttgatttttttgtgttttaatattttctaaaccgctcataccgctcttttaaaagcgtctcggtgtcttttttgcacagctcgtccgtctgcacggcaagcatctctttcactcggctgaaaagctccgccttcgttttgccggattcactgatgacgcgttccacaacgccaagcttttccatgtcctgtgcggtaagatgcaggcactctgcggcttccttcgctttctttgcgtctttccagagaatgctcgcgcagccctccggggaaacgacggaatacacggcgttctccaaaatccacacgcggtccgcaaccgccagcgcaagtgcgccgccgctgccgccttcaccgaccaaaatcgagatgaccggcgttttcagcccgatcatttccacaaggttttcggcaatggcctgtccctgcccgcgctcctctgcgccgatgccgcagaacgcgccggaggtatccacaaagcaaatcaccgggcgatggaatttctctgcctgcttcatcaggcgcagcgcctttcggtagccctccgggttcggcgaaccgaagttgcggtagaccttatcctttgtgtctgcgcccttttcgatggcgatgaccgtcaccgcgcggccgccgagcgtcgcgatgccgccgatgaccgcggggtcatccgcaaaacggcggtcgccgtgcagctcaatgaaatccgggaaaatattctgaatgaagctgaggccgctcgggcgtcccttgccgcgagcaagctgaaccttttcgtatgccgttgccattatgcttcagcctcctttgtctcacctgcatccgcctgctgtacgcaggcatcctgtttgccctcattgtgcagacgcaggagccgcgcgattacatcacgctggcggcttctcggcgtgatgagatcaataaagccgtgctccaaaaggaactccgcacgctgaaagccctccggcagctttttgcggatggtctgttcaatgacacgcgcaccggcaaaaccgaccattgcgtcaggctccgccatgatgacgtcgccgtccatggcaaagctcgccgtcacgccgcccgttgtggggtcggtcagcacagtgagataaaagagccctgcatcgctgtgcaggcgtaccgcgccgctcgttttcgccatctgcatcaaagacaaaatgccctcctgcattctggcgccgcctgccgccgtaaagccgataacagacagacggtgctctgtggcatactcaaacaaacgcgtgatcttctcgccgacaaccgtgcccatgctgcccatcataaaatgcgggtccatgcagaacacggcgcagtcctcgcccattacctttgcggtgccgcagacgacggcttccttttctcgggtcgcaaggcgcgcgcttttcagtttattttcatagttcggaaactccagaatgtcatgactcgtcatgtcggcatcgagctccgtaaacgtatcgtcgtccgccaaaaagctgatgcgctggcgtgccgtcatgcggaaatggtggccgcagcggcagacgttcaggtcgtcccaaagctcggagaccggggtctgcgtgccgcacttcgggcatgtcattgtgatctcgtgctgctcctcctgcgggtttttcagttgttttccgcccttttccagctcattctggggcgagcggaacagacccatcaaattcataacggtctactcccttcggtaaatgaacttcctcagccctcacggtttttgatgaagtccgtataataatctccgctgtggaaaacggggtcgcggataatatcgatctgatcttcaatgttgttcggcaaaccgccgatgacaagctcgcacaaggcggactgcatcttgcgtatcgcttcttctcttgtcgaagaaaacacaatcatcttgccgagcatggaatcgtaaaacggcggcacctcgtagccctgatataagaacgtatcaaagcgcacccacgggccggacggaatgtgcaggaaattcactttgcccacgccgcccgcgttgatgcggcactcgatcgccgcgccgcgcactttaatgtctgcctgcgtgcagtcaagctctacacccgctgcaatgcggatctgccattttacaatgtctttgccggtgacgagctccgaaaccggatgctctacctgaaggcgcgtgttcatttccataaaatagaaattcttgtcgcggtccatcaaaaattccaccgtaccggcattcacatagcccacggctttcgccgctttcgtcgccgcctcaaacagctcggcgcgcttttcctttgtcacaccgggcgagggggattcttcaatcagcttctggttattgcgctgaatggagcactcgcgctcgccaaggcacaccacgtgcccctgctcgtcacagagcagctgcacttctatgtgttttgccgggtaaatgtatttttccatgtacatgcggccgtcaccgaacgcctgctgcgcttcgcttgatgccgttttaaacgcctgttccagctcgtcctcggtctttacaagtcgaatgcccttgccgccgccgcctgccgatgcttttaacatgacggggtagccgatctcctttgccgccttttttgcttcgtcgacattttccaaaatgccgctgcccggaataatcggcacgccggacgctttcatcagtctgcgtgcggcgtccttatcgcccatgcggtcgatgagttcgccggacgggcccacaaacgcgatgccgtactttttgcacagcttcgcaaacgaagcattttccgccaaaaagccgtagccggggtgaatggcctgcgctttcgacgcaatggccgcgctgatgatgcgctcctgattcaaatagctgtccttcgccgccgcctcgccgatgcagatggcttcatcggccagcgccacgtggatagactccgcgtccgccttggaatacaccgccacggtgcggatgcccatttccttgcaggcacgaataatacgcaccgcaatttcgccgcggttcgcgataagcagtttcgtaaacatagcctgttcctttccgccgagcttacgccttgacgagcgcaaacgagaactctgccgaaacgcagaccttgctgtttacgcggcccgtaccctttgcaaaatagaacatgccgcgctggcgcacgagctcgcactcggtctccagcgtatcaccgggcttcaccatgccgcggaacttcaccttatcgaggctcgtaaacaccggggtcatgccctccgatgcaccgtctgcgagcagcacgcaggcgctctgcgccagcatttcgcactgaatcacgcccggcacgatggggttgcccggaaaatggccctgcaaaaagtattcgtcaccgcggatgtggcacttgccgaacgctttgccgtcaatgagctccacttcgtctacgagaagcatcggctcgcggtgcggcaggatctttttgatctcttccttgttcatctaacgtattcctttccacggaaaatcccggggacgcgcatttttttgacggcgctccgggagcttttcatcttaaataatgcggaacaacggctggtcgtattcgacgacctgcccgttgccgacgcaaatctcggcaatctcgccgtccatttcgctgttgatctcgttcatcagcttcatggcctcaatgatgcagagcgtgtcgcccttgtgcaccgtgtcgcccacggcgacgaacggcttgctgtccggagacggcgcggcgtaaaacacgcctacggcagggctttttacataaacgccctctttctccttcacttccgcaatgggctccgtcgtgtgcatctgctccggcacggcgggctgcacggcgttcaggatcggcgccgcctgcacgacctgcgcggcgcgctcgatgacgatattttcgccgtttatttccagcttcgtcagctcgttctgcttgacgatctccgccaaagccgcaatgtctttaatattcacaaacgtccctccgttgaatcaagcggtatttatccgggtattcccgcagataccctgcggtgtcgtactccatattttactacaaaaccttgcgaattgcaatacaagcgttgtggccgccaaagccgagggaaacggacagggcgaggtcaaggtcaacctttctcgcttcgttcgggcagacgtcaaggtcgcagtccgggtccggctctttgtagttgatggtcggcggaacgatgccctctttcaccgccagcgcggaagcaatggcctccaccgcgccggccgcgcccaacatgtggcccgtcatggactttgtagagctgatgacaacgtcatatgcgtgctcgccgaacgcctttttaatggccagcgtctcactgcgctcgttgagcggcgtgctggtgccgtgcgcgttgatgtaaattttctcgtttgcaaggtccgcgcccgcttcttcgtaagccatgcggatggctcttgcgccgccgttgccctccggatccggggcagtcatgtggtgcgcgtcgtccgtagcgccgtaacccacgatctccgcgtacattctcgcgccgcgcgcctttgcgtgctcatattcttcgagaatgagcgccgcgccgccctcgcccatgacaaagccgcttctgcgcttatcaaacgggcagcaagcgtcttccgggtcggggcaggtggtcagcgccgtcatattgccgaagcccgccacgcccacagggacaatggctgcttccgcgccgccggcgatgatggcatcgagatagccatgcttaatggcgcggtacgcttcaccgatctcgttgttgctcgtcgcgcacgccgtggtgatcggcaggcaggagccctgcgcgttgaacttaatggcgatgttgccgcccgcgatattcgcaatgagcatcgggataaaatacgcggaaacgcggcgcgggcccttttcgttcagcgccgtcacctgattggagaacgtctggatgccgccgataccggaaccgaaatacacgccgaagcgctccgggtcgatctttcccatgatttcgctgtcgttcaccgcctgcgttgccgccgcgatggcaaactgagagaacgggtcgttcttgcgcacttcgcccttatccatgtacagcagcgggtcaaaatccttgacctccgccgccacatgcgctttgaagtccgtggagtcaaacttcgtgattttcgtgatgccgcacttgccggctttcaggttttcccagaacgtatccacatcgttgccgatcggggtaactgcgccgagacccgtgataactactcttctttccatttttttcaggcttccgaaacggaagcactcctttctcttgaaagttttgaaccgatttatctttttacgttgaaaacttaatcaataagaactttttcaagcccgtaaaatctcaaagttcacaggttttaaatagccaaaccgccgtccaccttcagcacttcgcccgtaatgtacgccgcgctgtcggaagccaaaaacgccactgccgccgcaatatcctccggcttgcccattctgcccagcgggatgctgtttaaaagtggattgttgtcgccgagattttctgtcatgtccgtctggataaagcccggcgccaccgcattgcaggtgatgccgcgggaagcgagttcgcgcgccacggatttcgtcagaccgatgacgcccgcctttgaagcggaataattcgcctgccctgcgttgcccataatgccggaaacggaggaaatgttgatgattctgccgcttttcttgcggatgaatccggaatagcacgcgcgaatcatgttgaacgcgcccttcaaattcgtgtcgagcaccgcatcaaaatcctcgtccttcatgcgcagcatcaggccgtcgcgtgtgatgcccgcgttgttgacgagaatatcgatcttgccgaggtcgttcgtcaccgctttcacggtttcgttcaccgcggcggaatccgccacgttgcaccggtatgcttttgcgtttacgccaagcgccgtgatttcgttcacaacagcttcggccttatcggcgctgcctgcgtagatgaccgccacattcgcgccgtcttcggcaaggcgcagcgcaatggcgcgaccgatgcctctggatgcgcccgtaacgagcgccgttttgccgtttaagctcatgcgttttctccttctgcacggatcgcctgcaccgctgccgaaagcgtctccgcgtcttccacgttatataccttcaccgcgcggctcgtctttttgatgaggccgcacagcgttttgcctgcgcccacttcaacaaacgtatccacgcccgcctcaatcattgtttcaacggtctgctgccagcgcaccgggtgtgccacctgctgtgtcagcagttcttttgccgtttctttcgtgtacggctccgccgtgtagttcgcgtagaccgacacagtcggctccttcacgtccatcgtctccaaaacgtcgtgcagacgcgcagaagcgctctccataaacggagaatggaagccgccgctcacattcagcggtacggctctgccgccgtttgcggcaacgtcggaaaggaaatccggcaaagtcgttttcagacccgccacgacgagctgacccgggcagttgtagtttaccgggaacacgctctggtgcatgcggcacagctcctcaaccttttcgttcggcagcttcaaaaccgccgccatggcgctgtctgcctgctcggctgccgcctgcatcgcttcgccgcgctttgtgacgagcgagaagccctcttccgttgtaaagatgcccgcaaacgtcaccgccgccacttcgccgagcgagaagcccgccgtcatatcgggcgtgatacccgcttcgcgcagcgcttctgccgccgcaaggtcaacgcagaaaaggcacggctgcgtgtttttcgtgatgctgatctcctccaaggtgccggaaaagcactggttcttcgtgccggggcggatgctctccgccgtgtcaaacacgttcttcgccgccgcgctgtgctcgtaaagggacttgcccatgccgctgtactgtgcgccctgaccggagaaaacaaaggctactttacccatttggtcgcccccttcagcacgtcttccgcctgcgtgaagatctcttcgatgatctcctttgcggtctgctctttgttcaccatgccggcgatctggcccgcaaggaagcagccggtcttttcgtcgccctccacggccgcacggtacagagcgcctctgccgtacgcttcaagctcctcgtcggaaatattgctgtactcaagcttaaaatattcctttgtgtacgggttcttgatgctgcgcaccgggtgaccgagacgcttgccggtagacatcgtcgcaatatcattggcctttaagaccttgtttttgtagttctggtgcacaccgcactcctttgcaaccaggaagcgcgtgccgagctgcacgcccacagcgcccagcatgaatgctgccgccacgccgcggccgtcgccgatgccgcccgccgcgataaccggaatcgtcactgcgctcgtcacctgcggcacaagcgccatggtggtcgtttcgccgatatggccgccgctttcgccgccctccgcaatgaccgcacaagcgcccacgcgctgcatcagacgtgccatgctaacggatgccacgaccgggataaccttaatgccggccgcaagccagtctttcatatatttggaggggttacccgcgccggtcgttacgaccgccactttttcctccgcaaccacctttgccacctcgtccgcgaacgggctcatcagcatgatgttcacaccaaagggcttatcggtcagttctcttgcaattttaatctgctcgcgcaggtactctgcgtttgcgttcatagcggaaataatgccaaggccgcccgcttcggaaacggcgcctgctaatttgccgtccgagatccaagccatgccgccctgaaagatcgggtagcgaatgccaagcatgtcacaaatcggtgttgagatcataatgttttcccctttccggcttttgcctgttgaaaatgtttcggtttttctttatttttgactgtatgtcgtgtttttaccagcggatgatcatggcgcctgcagaaagaccgccgccgaatgccgccagaatgatgaggtcgccctcgtgaatcttgcccgcgcggttcatctcatccaagaggatcggcacactcgcggaagacgtgttgccgtagcggtcgatgttgatgcagaacttctccggcgcaatgtcggggattctgcggcgcgcctcgttgatgatgcggtaatttgcctgatgcggaatgacaagcgccacgtcttcgcccgcaacgcccgccgaagccatcagatccttgatgttgtcggacatcgccataacggcgaatttgtacgtctcgcggccgttcatgtgtacggacgtaatctcgctgatctcgtttttgtaccacggggaacggtcatagcgcgtcggaattgtgattacatcgtcgccgccctttgtcatcaggtgagaggccacaagaccgtcgcctttaccgagcaccgccgcgcccgcgccgtcgccgaaaatgcagcacgtaccgcggtctgtccagtcgatgataccgctcatgcgctctgcgctgacgacaagcacgcggttatacgcgccgcgggaaaggaagcccgccgccgtttccaacgcaaagaggaagccgctgcaggccgccgcaaggtcaaacgccgggcagtgcgcgccgatgcggttctgcaccatgcatcccgtgcccggagaaagcgtgtcgcccgtgatggtcgtcgcaatgatgaggtcgagctcatcggcagagatgcccgcattttccagcgcgcgctcggccgctttcaccgccatatccacattcgtttccgtctcgctgatgtggcgggagcgcacgccgatgcgctgtgtgatccattcatcgttggtgtctacaagcgcagaaaggtcgtcgttcgtcacaacgtgttccggcgcgtagctgcctgtacctaaaattttaaagctcatagttttctttcctttccggccgaaaaaatttcggcagcgccgtaaaggcaatataataaccttgttaaagtgaatatttgttaaaagtctttgattaaactttcttcgagaaagtttatggggtctcggggcaacgccctgagtcgagctccgcagagctcgaaatctttttgcctacccaaagatcaggagaggagagtttatcgtccggtggacgatgaacgccggggaaccctatcaaggggtttccaatgatttgccgcgcaaatcattgaaagaaacctaaagaaatcacaatttcgtctgaaaataagaattgatgcgcgtcatggtgcgcagaagctcctcgcgctcctcttccgaaaggtcctcgcagatctccgcaatgatgcgccggtggcagcggcggtggaacgcctccacttttttgccctcaggcgttagcattacctgcaccgcgcggccgtcgccgggcaggcgctgcttttcgcagtagcccttctgcaccagcttgttcaccgccaccgtaacggagggctttgtcaccttgagctgctgggcgatctcgctgaccgtcatgccggttttgcctttggcaatgagctcgatcatgtgcatctcgttgatggagatgttcagccgttgttttttcagttcgttctgctccaagatctgcacattgcgatagatctccaccagaagctcgtttgctttcgcagaaaagccagacatgctgcacactcctttcgcccatttgcgccgtttttcgataaatttagttaaacaaactaacgaacaaccgctgatattgtactcgtttcgcggcaaaatgtcaagtaaaacgctttcgcgcatcctctttttcctttgaagtgcccttctttccccgtaaagttatctcgaagctgataccaacttgggctcccttgtaagaattctgaaataaatctgttctttttccgtagtaatttgcgctttaattcttttatggaattaaaaatcggaagttatcatgtagaatagtcccgtgtataaaaagggggttcgtatgcccttttatgaaatcgaaatttattgctgaaaggaagtttttccgttgaagctgttttctaaaaacatgaagcgcatcactgcagccgtgctttccgccctgctgctctgtgccgcaccgctcagctacgccgacgataccgtagccgatatggaagccaagcagaccgagctcgccaacaaaaaggccgacctcgaaaacaaaatctcctctctggagtctcaggaggccgataaaaccgaataccttaccctgctctccgaaaagattgataccatcaaggagcagatcgataccgcaaacagtgacatcaccgtgctgaacaccagcattaaaaagctcgaaaaagagctcagcgattccgcagatcagatctccgataccatggagcttctgaaaaagcgtctcgccgtgctgtactccgccggctgcaccgtcggcacactggagattctcttcaattccgaaagcctgcatgatttctccatgcgcgcagaggccgtctccaccatcacccgccacgataagcagctcatcgatacggttgcagcgtacatgaacgagacaaaggcacagcgcgaagagcttgaaaaggaaaagaccgcgctcgccgatgccaaaaagctgtatgaatcaagcgaagaagaattaaagcagctcgaaagcgacaacaccgccctgctcgagcagattcgctccgataagagcagtgccgagaccgagctttcccgtaccgaggaagaagaatacgtgcttgcaaacatgatggcggcaaagatcgccgaaatgcagcagcagatggcacaggcaaaagccacgcccaccccgaccccggtaccgaccgtagagcccacacctacgccgaccccggtgcctgaagaagaagtggacgataacggcaacgttatgcctacccctacaccgaccccggtgccgaccgtaaagccgacccccaccccgaccccggtgccgcagccgtcttatggtgatgactattccggtgaaagctttgcatggcctgttccgggctggaccggcgtcagctgtgcattcggcaacggccactacggcatggatatccccgcaagtcgcggcacgccgatcgtggcatcccgctccggcacggtcatgaccgcaaacggctccgatgattggggctattcctggggctactacgtctccatttaccacgacggcacttattccaccctgtacgcacacatgagcgccgtcgccgtcagcgagggccagtgggtcaacaagggcgatgtcatcggctatgtcggcgataccggctattccttcggtgatcactgccactttgaagtctatcaaaacggcacccgtgtagacccgtcccagttcgtataattttcatccataaatcaagcgccgagctttcatggaagcccggcgcttttgttttctctataatttctgccatcacgcatggcaaagagctcggcgtatacctgtatatctacaccggcggcgacgccgacccgtgcgtgttcatccattattccgattccaacatccgcgaaaaaacactgctcgaagtcctgcagtcgccgctcttcatggcgtaccacgatggccagccgttcaacgaaaaccacctgcgcccgtgccccatgccggaaaacccggagctgctgcgcgagatgattgcgaaggtcggcggttttcctttttataaacatcctaagacatttcaccgcccaaagggcagtttcacaaatccctagggaatttatcttgttgaaaaaaggactttgcaaaacgcaaagtccttttttctggctgggctggcgggattcgaacccacgaggtgacggagtcaaagtccgttgccttaccgcttggcgacagcccaatattcgataccccaagagtatagcatatttcaggccgttagtcaaacgttttaagcaaagaaaagccgtgcgcaaacaggttttccttctgcgcacggcttcatatccttctttgaaattattccgctttcagcgtgtagcgtttgtacgggcggtctgcaatgccgccggagattgccatcgtagattccgtctccagcgtgagcgcgtcaccctcaaatgtgaagatcattcgtctgccgcctgcggattccgcacagcgaacttcgagctcaaagcgcttgtcactgcgccagcgacccacagcgccgtaggtacggccgccgagcgtaaagctcgtgaagtggctctgaaggccgatctccgccgtaaattcgccgttatcctgctcgaaaacgagatttgcttttttgggcgcaaattcaaagcgcagcgtctttgtcacaccgccctgcggggccacaatccacacgccgccgatgaaatcgacaagccccggaacttcctccgtaaacgcgaatttcttaccctcaatctctttttcggaccacgggttgcgggaagacagcatcggcgtgatctccgctctttccaaacgcttcttcaaaacgtgcgccatggggctttccggcagcgtttcctcgtccgtgatggccggcagcagcgcctcccacgcgcaggtcagctgctcctgctgattggaggaagaactctgcaaaatgagcacggtgtctttgtcctcaaacaccacgccgtactggccgaacgcgccgtccgcgcggaacacatgctccggcacgcagcgccagaactggaagccgtagccacagcgccagtcggggttatccgcattattcgccggactgatcgtcgagacctgatttgcgctcgccatgtcgaaccattcggcgtttaaaagctgcttgccctcccacttgccgtgccgggaaacaaacaaaataaagcgcgccatgtcttcggtcttcaggcggctgcccgcgccgcccatttcaatgccgtccggcaggcggaagcactcaatattctccatgccgagcggctcaaaaagacgcggcgtaaggtactcgaacagattctcacccgtgcggcgcttcagcgcggcgcacagcatgttcgtgccggcggtgttgtacataaagcacgtgccgggcttatatttaaactcgtgcgaaaggaaattcttaatccaatccggctcgttcacgtcgaacgtattgatctccgtctcgtggccgcaggacatcgtgagcagatcgcgcaccgtgcaggcaagcagattttcgctcggattttccggcatcttgtccgggaacagctcgctcaagcggtcgtcaagagacagcgctccctcctggcacgcaaagccgatagccgtggaggtcagcgcctttgtaaaggagaacatcatgtgcggcgacgccgggttatacggcttccaccagccctctgcgcacaccttgccgtggcgcagcagcatcatgctgtgcagctcaagccctctgctttctgcaagatcgataaatttcaatatgccttcggaatgaatacccacgctttccggcgtgactctttccaatatcataaatataaccaccttccgtttgatactttaatcatagcacagccgcccgcccgtttccagtaaaaagaaaattcccccccgtaaaattcactgtcagaaatttagtgaacttgtcacgttctgaaagccgtgctataatttacccgaaaagggcggctgctcgggccgcgaaaggagaaaactatgcttttagataaagcgtcttcaaaaggcaaatttgcgctgaaaattcttgccgtgtttttgatttgtgccgcggatatgcttttcgccgcatgggtcatatacgccgaaaaacaaaaaggcacgctgctctccgtgcgggcggcttcctcgcacctgccgcagctctttgcgcaaaatctgctcacgtccgccgtgcccgcttttcttgttttcctcgcgctcgttttctgcaaaaagcgctttgtgcaggcgatgcagctgaccgtccccaaaggcaaaacaagaaaaatcgctgttttgttgctgtttctcctgcttatcgtcacggccgcagcgctgatcgtaaagccggataaaatcaccgtgctgtacagcctattctactacaccgttttcatcgcgttttgtgaggaattcgtcgtgcgcggcgtatgcgtggggcttttgcgggacgagcccgccgccgttcgctacctcgtgccaaacattctctttgccgccatgcacgtgttcgcctatgcggatttcggagcgatcaccgcgtcttaccttgtgcgttttgtatgctcacaaatggcggggcttgtcgccatgggctgccttttccaatacctcaaagaaaaatccggctccctgtggatccccgtcctcgtgcacgccgttttagattacacagccgtgttcggcttctaaaaattccccgcagcttcacgtcggaaatttcgcgaagctgcggggaaatttttacgaaaacaccttttccgtgttctgcacgcgcaggaacagcgttaggatcatgccgagcatcatcaggcccgccatggcaaaatacaagatgcggatactcgtgttttccaccagaatgccgccgaggttctgcattaaaatggcactcatcgcgtccgtagcgctgataacgcccagcgccgtggaaacggaacgcacctgcacaacgccgcgcacaatcttcaataagatcatcccgaacagcgtagaaccgatagcacgcaaaaccagcatggtcacaaccgcaacaaacgcgttcggcgccgtggcgtacagcaaaaactgcgccaccataatagcaaacgccaaaagcatcagcgtgcgccctgaaaagcgatccataaatttgtacgaaaacaaaatgacaggcagctcaacaatcgtactgaaaaacagcactgtgcccaccgcacccgtcggcatgccgagctcctgcaataaaatggggctgtatgtcatgttgaggtttgagcagcccgaaaaaataaacccgatgatgacgaacaaaatgtacatcggcgcacagagaaatgaaaactgcttgcccgccgcagcctttgccgcttccgtatccgtaaacgaaatgtcgtccgtgccgaggaaacccacaatggccagcaccgccgaaacggagaccgaaacaaaaatcagctgcgggctcgtaaattccatcatggcgcaggccacctgtacggccgccgcataaccgaacgtgccccaaatacgaatggtgccgtagcggtacttcgtcgaggttgccatgcgctcgctcaccggcgaaagcgatgagataaaccccatgatgcagccgtttaaaaggaacagcagcatcgtttcgcgcaccagcgcaaacagaatgccgaacaccgccacgcacgccatcatcaccgtacagataagccgcggctttcgcagcttatcattgatataccccacgatcgggatcagcaccacgccgaacaagctcgaagccgacataatgaaggacatctccgctttcgatttgccgatgcccgtcagatacatagacagcaccgaggtaaacacgcccaagctccagtaaaagaagaaataggtcagggcatacgccgggtaactgccgcgaaacgttcgcttgcttttttccatctcaatccaaccgccttcccaaaatttagggcgcacgccgcacacaatgtgcagcccttcccctcaaggcttatttacgtccatcataccaaatcccccgttgcgtttcaagctttttgcgcacggaaaagtttttatttttgcaaagcggtaaagagatactccctggcaaaaaaacgaagcagaatacggtgcagccctttgaaaacaagtgcaaaataagcaactgcgttctaccttaactgcgaggcgatgttcgggagcactcccgtttttcttttccgacgtgacagaagaagcgttttataaaagtgtcagagaaaattttttcgccccatgttactcaactgtcggtcggttgcttgtgcgggtggactatggtatgctaaagaaaagtcctaaggggaggaaaatttatgaatttatcaaaaataggacagtttatcagccggcgcaggatggccatgggtcttacgcaggctcaactggccgaacgactgaatgtaaccgacaaagcggtctctaagtgggaacgtggcaaaagcctgcccgacgtgacgcttttcagccgtgtggctgcggagctgcgcgtcagcgttgtggagcttctcagcggcgaactcatgaacgtggttcgcagcagcaatctggacgaggccgtcgattgggatggaaaagcagctcaggccacacctctcactttacgccgggacgatcctgcggatttactggtttcgccctacttgttcggctgcaatctggagcacactcgctcctgtatctataccggcctatctgctcagatggttcgcaatcgaaagtttgccgggaagcccacggcttgcgagggctgcgccatagaatggttccccttgggggaacgtggcgtgtttgccttggatgagccctacacccgccacggagaaggctaccacatgaagcggaccctcgaatgtaattccgtcggtatcttcaacccctactgcggggaagctgtcggcatgggtcagcatggcatcacaatatcccaggggcaaccgtatctgttcggaatggtggttaaaacccaagaatcggtgaagtttacggtttcattgacagatcggaccggaaagaacgtctactgccgtgccacatctgtaggtggcggcgacgattggacccgtttagaggtggagctcaccccgcaggccgctgaccctgatgccgacctgcgaatctgctgggagaatgcgggttacgtctgcgtaggagccgtttctttgctgcccaaggatcacttccacggaatgcgccgcgatgtggtggaagccatgaaggatttgggcatcaaggtgctgcgctggccgggcggcaattttgccggggaattcaactggatggacggccttttgccggcggatatgcgtgcgccgttccagtcttatttgggcctggagactcaacctcacaccatgggctacgatttcagcgagattaataccgatgactttatcgccctgtgtcgagaaatcggtgccgagccgtttatcaccatcaacccctgttggaacacccccgatgagaacgccgcttgggtggaatactgcaacggtgatgtctcaaccccctacggaaaactccgagccaatcggggtcaccaagagccttacaatgtgcagttttggtcattgggtaacgaattcggctatggtcacatggagggcgacaacactcctgccgggtactgtcagatcgcactggagaatggcaaaaaaatgctggaggcctcacccggtctcagcctgtgctcctcgggaccctatcctaacaaggaatgggcagaattttcagccaagccgcttgccgggatttctcagatgatttcccagcactattatggctacgaccctcattacaccgacctttccaccgtagaggaggaatataaccggtgcatggcttctgtctcccggatgcgggagctgattcaccagtcccggcagtggctggagccttctatacgcatttccatggacgagtggaatgtgtggtatgcctggtaccgtccttccagtgttaccgacggtatttatgcggcgctggttctgcacatgttgatggaagaggcggaaaaaagcgggatagcccttgcgtgtcactttcaggcgatcaacgagggaatgctgtgtgtgaaaccggatcacgtgagcttgacagcgcaaggacaagtgttctcttggatgaatcgctggcacatgggtaatcgtctgtgctccgcgtctcaagaagccgttattaccgtggatcgagagggtcgggtgtccgccacagtggtgaacgccgcatttcaccgcaaaaagccggtggacttctcttcctttggaccttgcagcgaggcggtgctcttctccagtgacaccgtgttgcctccctcctcatttacccagtcaaacgttctggaccaagctacgggtggaaccttgcaaatgccgccgcacagcgttttgttcttgcgcttttaagaagcaggttttgattcgaacggtcggggaaatacggacaaaacagccgggctgtgaagtgttttcgggcttgaactgcggcgaggatgtttcatgttgtatcgcttttttcttgacgcaagagtgctttgccgttataatgagaaaaagtgaaatttaaaaggggggcaccacgatggcagacattcgggcatttcatgccatgcggtacacaaaatcggcgggagaagcgaaagaactgacctgtccgccgtatgacatcatcagtgaagcggagcgcgcggcgtttttggaaagaaacccgcacaacgtcatacgcctggagctgccgcgcggcgaagaaccgtataagaccgccgacaagatgttgcacacgtggctttccgacggcactttgcgctgtgacaaggacgcaggtctttatatctacgaggaagaattcaaaaccggcgtagaccatggcgaggcgcgcagcctaaagggcatcgtgtgccttgtgcgtgtggaggatttttccgcgggcgttgtgctgccgcacgaagagacgctctctaaggcgaaaaaggaccgttttgagctgatgaaggcgacgaactgcaacttcagctcgatttactctttgtatcaggacgaaaagggcgagacgcaaaagcgcatcgaccgcctttccgccggcacgccgtactgcgaattttcagacggacttgtcacacaccgcctgtggattgtgaatgacaagcaggcgcttgaagcattccgtgccgattttgcgccgcgcaaattgtacattgcggacgggcatcaccgctatgaaaccgcaattcattaccgcgattactgccgcgaaaacgccgtttgggcgccgggcagcgaattcgtcatgatgacgctcgtcgatatggcacacccggggcttgtggtgttcccaacgcaccgccttgtgcgtggcattgagggattttccgccgaaaaggtacttgaaagctgcgaggaatactttcaaatcgagatgcttgcggacaaaagcgagattgcgccgcgcatgaaaaatgcgtatgatgccgggcaaaaggcgttcgtattcgtgtataaagacggggacaaaatgaactacgcgctgctgattttgaaagacgcggcggttatggaagcatttatgcccgaaaagagcgaggcctcgcgcaggttggacgtcagtgttttgcacacgctcattttggagcgcgctctcgggattgatcgcgaaaatatggcaagtcagaaaaacttgacgtatacgcgcggtttgaacgaagcgctttccacggttgaaagcgacgagatgcagtgtgcatttattttgaaccccacgcgcgtggaggagatcggcgcggtagcggctgcgggcgaaaagatgccgcagaagtccacgtatttttacccgaagcttatcacagggcttgtaatgaacaatttgggaacgcctgtggaagattaaaatttatttttaataagtcaagcgccgtgctttcattcaagcatgacgcttgattttatatatcaacacagaaaacaattcttttcaaccatgccgcttttcacgtcaaagcaggtaccggacgcaccactgtgtatttccgtaaaactttgtaacgtgtataattccccgcatttctcaaatactacccataccgaaactttgaaaacaagggagatttgagatatgaaggcaaccggtatcgtcagacgtatggatgatctcgggcgagtggtggtgccgaaagagctgcgccgcaccatgaagatcagcgagggcacgccgcttgaaattttcatcgacaaagacggcagcatcatcttccgcaaatactcgcccgtgggagaactgaacgaaagtgccaaaaacatggcggagtgcatctcggcggcaagcggcatcggcaccgccgtgtgcgaccgcgaccgcatcatcgcaacggcaggtatcccgaaaaaggatttgctggataagcctgtctccaagcaattggatgagctgatgcgccgcaaaaaggcattcatctcatccggcgaggacaccgttttggcggcggagggcgggctgcgcaccgcaaacgcagcgttccccatctcctgtgcgggcgatttgtgcggcatgttcctgctcattaaagacgaagacgcaaagcccggcgaaacgcaggagcatttgcggctcggcaagctcgcgtccgattttttaagccgcgaaacagccgagtaacatggaaagagtcgctgaaagcttttaatccaacttttttcaaagaagttgaaaccgaacttctcgttcggttgtagtttccaaaggcagcgcctttggtcgagctccgcagaaagcgaaatctttttgccgactgatataatcctctcccggcgtagccgggagaggatttctttataatatgaaaaggtgctgtgaggttcgttagctcgctgtatttctccctcagtcagcttcgctgacagctcccttatcagaagaagtctgctatatatttctcaaatcctgccgaattctatccttttcaaaagaaacttgaaagcttattgcaaaaaaacatttttgaaatatacaacatgcataaacttcaaatgcgcaaaatagaatatctgtataaattgcaattcgccattgcaatatctggcaatatgatatataattaaagagcaatctcaaattgaaattgtaaattatacatataaggggtgtttttccatgaacacatatccggctaagaacatcatcaacgttgctatggcaggccattccggcgccggcaagacctccctcgcggaagctatgctttatcttgcaggcgcatccgatcgtcgcggtaaagtaggcgagggcaacacggtctgtgattccgacccggaggagatccgccgcaagacgtctgtctccacggccgtggcaccgtttgaatggaaaaataaaaagatcaacctgctggacaccccgggtcttttcgacttccagggcggtctgtatgaagccgcacgcgcggcagaatccgttgtcatcgtgcttgcaggcaagagcggcgtttccgtcggtacggaaaaggcttttgcggcagcggaaaagcgcggcctgtctaagattttcttcgtaaacggcctgtgcgatgaaggttccgacttctataaagtgttcgaagatttaaaggcgagcttcggcccgtctgtctgcccgattgttgtgccgtattttgaggacggcaaggcagataaatatatcaatatgctggaatataaggcgtacgattactccggcggcaagcctgtacaggtagatatgccgaacatgggcgcccgtcttgagggtctgcgtaccgccatttacgaggccgtcgccgaaacgagcgacgagctgttcgagaaatatttctccggcgaagaattcacgccggaagaggttatcgtcggtgtttcccagggtgttaaaagcggcaccatttcgcccgtattctgcggcgacgctatgctcatgcgcggcatggagcagtttatggacggcctttgctggctcgccccgagcgcggcggataagggcgcggaaatcggcgtagacgtagacggaaaccccgttgagattgccgttaaagaagatgccgccacggctgccatcgtcttcaagaccgttgcagacccgttcatcggcaaactctcctacgtaaaggtgctctccggcaaaatctccacagagaccccgctcatcaacatgcgcaccggaaacacggagcgcgtcggcaaaaccgtcatgatgtgcggcaaaaagcaggaagatgtaaaagccatcaccgcgggcgatatcggcgccatcccgaagcttgccggcgtcaacacgggcgatacgctctgcgcacccgcacgcaaggtcacactggacggcatcgcataccccaccccggagatgcgtatggccatcgtcccgaagaacaagggcgacgaagataaggtcgcgcagggcatcatgcgtcttgcggaagaagacccgacgattcgttttgaaaataacgcagaaaccaaagaaatggtcatcagcggcatgggcgaacagcaccttgatgtcatcgtctccaagctgaagacgaagttcggcgtagatgtcacgctgcgcagcccgcgcgttccgtaccgcgagacgatccgcaagaccgtttccgtacaaggcagacataagaagcagaccggcggccacggccagttcggtgatgtgtggatcgaattctccccctgcgatgcagacggcttggagtttgcagagcgcgttgtcggcggcgcagtgccgaaaggcttcttccccgccgttgaaaagggtctgcgcgagtgcatcgcaagaggtcctctcgccggttatccggtcgtcggtctcaaggcgacgctgtatgacggctcctatcaccccgtagactccagcgaaatggcgtttaagaccgctgcttccattgcctataaaaacggcatgccgcaggcgaaccccgttctgcttgagcccatcggcgaattgaaggctaccgtgccggacgctaacatgggcgatatcatgggcgaagttaacaagcgccgcggccgtgtgctgggcatgtccccggcagagaccgtcggctatcagaccgtagacgccgaagtgccgatggccgaaatgtacgatttcagcacctatgtgcgccaggtcacgcagggcagaggcagcttcacgtttgatttcgtgcgctacgaagaagccccgcagaatgttgcgcagaaggttattgaggccgcgaaagccaacggcgagattgactgaataaagccatgacaaaaagagacaaaagatactatcaatcttgatgtaattctctttaaatgcagcaatcgcatacgtgtggcacgtaatccattctaacttcacgaataaagctaaggcacaacctacggattttcctccgtaagttgtgcctttttctcaactgtatcgttcaaatgcttctttacatagagttaaccgcgttccgcctcaaaattgaagcggaacgcggttgcttactctacactgattttcaaaggtgcctgcatctctttccagtcaccgtcactcttcgcctttggaattttgcttagagtgataaccatgtgcctttctctgcggactctacaatagcatccagcaggtgctggtttgcctgtccatcctgaatattggcagcaagaccatcaccggtgccattcacaatgtctgcaaaggactgcatctgatcgcagaaatactgctgcggaatgggcagatggttgaaaacatgggcatcggcattgatgtctccggagcagacttcaatttcgtcaattccggcaggtgttgcatccaagctgtagacaatggcaccctcactgccgtaaatctccatacgctgatagttaccgcggccataagcgaatcgggtaatctggaagctgacagaaatctcatcttccatatccgccatgtagttgctgaaatcgtcgacatctacttttccgacacctttgccgtccagcaacggacgctcgtgtacgtaagtaccggtatgtcccacaacacgtgtatattctttgttcgtcacaaatcgtaccaaatccaaggcatggcttcccagatctcccagagcacctgtaccggttctgctcttgacatagcgccatactaaggggcagttggcacggggcaatccccacgcctgaaaatactgcatattcacgtgatagacacgcccgatcttgccctgcgcaatcagatccttggcgtagcgggcagcagccttgaatcggtaggagaagcacaccatattcttgacattcttctcctgagccgccttggtcagtatgtctgcttcctctgcggtcagggtgatgggcttttccaggttaaacggcttgccggcttccacggcagccattgccaccttgaagtgggcgtcattagaggtgcagatatccactgcatcgacaatgtcacagttaaccaaatctcgataatccgtaaaacggtactgcggaggaatcccatacttctcgccaacggcttcgagctttttctcatcaatatcgcagatggccaccaaggtcaaatcgggactcttggcaataccgggctcgtgcacgccgccccagatggctcctacgcctacagatcctacgcgaataactttcttttccatgttgaacacaactcctttaaattaagttataaattaaataaaattaatttattttttccagaatcattgcagagaagggaggaatttccaccacggtggcattctgagccccttcaaaggcctcttcacttaacaaatcgcggacgtaatttcccgacagcgtgtagctttggggacaatctgtgttgttgattactgtcaccagaagctcttcctgcaattggcgttccataacaaacaaatctccctgagaacggaatctaacggttccctcctgcagtgcttttctggtttttcgcaaccgcatcagcttctgatagtgcgtccgcaaatccgtattccaatgagattcctcccagtcgaacgccttacggcaatccgggtcattctcacccgtcataccaatttccgtgccatagtatgtgcagggcatacccacaaaggtaaacaggaaagccgccgcgtttttcaaccgcgccgtattcccgccgctgaccgtaaggaagcgggcagtgtcgtggctgtccagcagattgagcatagagtcattggccgcatcggaatagcgcatcaaattttccgtgagaatctcctgaaaacgctgaggagccactgcgctcttggcaaagtactccactgccgcgcgctgaacaccatagttcatcacgccatcgtactgatccccctgaagccacgcttccgaattgcgccagaactctccgataatcagtgcgtcgggattgatcccccgaacggtctcccgaaactctctccagaaatgggagtccacctcggtggctacatccagtctccaaccgtcaatacccatgcgggtccacttggccacggctcccagaagatattccttcgcctgaggattttccgtgttccacttgggcatacaggccgttctcaactgttcttcagataaatttttcaaaccggggtgtctgggggcatagggagtgtctccgaaagaatcaaaattcaaaggatcaaagctcaccggaaattcccgaatgtaaaaccaatcccggaaaggagattcctctccgtgctccaccacatcctggaactgcctaaaacctccgccacaatggttgaacacgccgtctaaaatcactcggatgccgcgcttatgagcctgattaatcagctccaccaaatcggattcatcgccaaaatgaggatcgatgcgcgtatagtctacggtgtcatacttgtggttggaagtggcttcaaaaatcggggtcaaatacagggcgttcactcccaattcttccaaataggaaagcttttgggtaatacccagcaaatctccgcccataaaaatctgtctgtccggcgcggtgccccaaggcgccacattctccggagaaagcttagggtttccgttgcaaaagcgctccggaaaaatctgatagaacaccgcactgttgacccaagatggctttttatggatgtcaatgcggttgataaacggaaaatggaagttaacaaaggctgaagattcatcctcgtccacgttgaccagttccggctttgcgaaaccgctgtccccatacagccactgttcgtcccccttttccaacaggaaatagtaggcaacgcgagggtcatctaccggatacacataagaatagtaatcaaacagctcgtctgaaccttccacctccatgggaacttccttgcgggtatgccagaggtatttatttccaatgaccaaagtcactcggtccaaatcgcccttccctgcacgcaaacgaaccttgaacttttcataggagatgggaaacgcataattgctgaccggattgtgaaatattgcctctcgattcatggaatcactcctttacaacagaattttaatctgatcggattctgccagccgcgtgaacacacagtcatttccgaaggtacgctccggcagcaagatcattacattgacgctctgggaatccacaacaaactggcggccgtgaagcacaccgggattcagccggacaaaggtaccccggggaacgcggaacgcctcaatggacgcaggattcacctgaaaaccggaaggtcccacaaatatatcaatgtcaccgtccagaggaagaattccctcgctggtaaatccatggtattccacaccggtgatgattctctcacactgggacacccgtgccacgcataccgaggcctgcattctttcatctaaacggagtgtcgtcaagtccgggatgaagatattatccgctccggccatagcatccatctgcttgatatggagcaaatccacaaaatctccatagggacgaaacgactcccgatccaacggttttgaaacaatctctctcatggcaatttttcctttctaagattacaggctatacacgccctgttcgtccgcatcatcaaaaatcattcccagataacgggcggcttcccgcagcacctttttgtagtttccgtaaattccacccacatgatggatataaggcccaaacatcagcttctcttcccacatcttccagttgtttgtttcaaaccacacataggttccgttggtttcgggtccgtctacccctttgccctcaccgccaaacagatagtactttccgtccatatcgtcgaaacggcataccgtaatggggccctttttcagttcaaaccgttcctgtccctggacaagtcgggcaacactggaagaatccttcaaggaatacgggaagggaccacaatgccacagcaactccgcgttgtcgttctgcggatggcgaatggtcaaatccgcaaggaaacaggcctctttgcccaaggtgaccgcctgcaacatcgccatggtcaccgctccgttgacatccgtctcacaggaaaccggcaatccctcatcagacagctcgcccaaagccatgcagacaggtgcgcctaaaattgtaaccgcgctccaacactccatcgctccggctgcacagtgcttttcctccatcagatcctgaatagccagtttagctgctgcggctcgctccaccgcctcttccttcataccggaagcatccatacgttgctttacattcgccacgtagtcttgtaatctgggagaattttcaccgatcaactgatccatacgggctgccactgtgttaggagatatcggcaccacagtcacacccaatttggttgccaaatctccctcattggccgtcacactcataaacggttccggtcttgctccaaacttggcgattcgcagatttttcaccgcctttataacggacaccacacggataaagctgtcaaagccattgcggaagtcctcgctttcggtctcgcagttccaaatataactatactgcactccgaaccggcgcattaccttggtgcaggcgaacatgccgcactgcgtatctcttcctcggctttcgtcggtgttaggccgctcatctcgagcaccccataccaaggtgggtaccttcatcgccgccgctacgcctgcggcacactgctcttcaccaaaatcgcaatggggggtaaacagcgcatcgatctttgcccggcggaatttttccaccacctgcgttattttttctgtttcgaacagtattccgttttcgcatatgtcatcaatatccaccagagtgaccacgtccggatgaataccgcgaataacagccataaacttttccttttgccgcttggcctcctccatgctcaaaaagccgcgcttagtaggcgctacgcccaccacaatgttctgctttttcatatctgcaacttcctcctataaaattctacacgctgatcaatttccgtatagtcgatttccccggtgcgcaaaaagcgctgcaccgtattccaatcgggaatgccggctctgccaccgattctggtacacttgatgcaagaaactcccgtggcaagccgagcggcttctttggaagaaagcccgcgcagcaatcctacggtatatgcgccgtggaacacatctccggcccccactgtatcctgcacatccactgcaaaggagggcatctgaaaaaagccatcctcctcgctgtaccctatgcagcctttggctcctaatgtgaataccacaatagaagggcccattttttggacctcccggcaatttgcttcaaaggcctcctcctttccccggaaaagcaccttatagaagaattccgaagcaataaaaacgtcgatgatgccgatattctccatcatttccgatgagtaggaatcggcgtccacgatgattttggctcccgctttctttgcccgcttggctgattccattgccacatgtgtggcatgagagataaaaaaccactgacaccccgtcagaattcgttcctctatctcctccaacgtagggggatttgccgtgccggatcggtacacgatactccgtccctgcgtctcgcggtcgctgagcactatggagagagatgtcgtttctccttggcgcgttttcattccggatatgtcaattccatgacgttcaaaatcccgtaagcaaaactcgccgtagtcatcgcttcccaccgcacctatcatggcgcatttagctcccaatctggctgccgccaccatgccggtggccacttttcctccgccctgccagctcatagcgtttatcccggttcctccgtttggcttgggaaacacatccacattcactgccaggtctacacagggcatgtcatagcccgctatttcaaattcttttaacacaactcttcctaaagcctcctttgcgttaagttaactaaaatgtaaacttattcggattaagcaaacgcattttaccacgtacaaaatctatagcgttttcggaagtctccatcatcagtcggaacatgtccccgttcttttcagccagatccccatgctgtaccacaccgtgatagcaagctcgaaaatactcagtggctatgttgaacttgctcatacccaggcgcacactctcctgcaactgctcgggaggaatatccgaacacccatgcagtaccagcggaatgggcagagcgctacgcaaagaagcaatacggtcaaagtccagattcggggtttgcacgtaggcaccgtgcgcattgcccacagccaccgccagagatccgcaacccgtgcatttcacaaattccacagcctgctttacgtcggtgtaatgatcgctgttgacgatgtcatccagattggctcccgagcccacatgacccagttcggcctctacgtctacgccaaacaccgctgctgttttcacaaccgctgctgtcagcgccatattttcctcatacggcaacgctgagccgtccaccatcacagacggaaagccatcccgcacgccgctcactgctatttcatagccggcagaatgatccagatgtacgccgatgggcactgaagatttttctgcaaaatctttggcgatagccgccacatgttttaaggcgatgtacttgtcgaagccgggataaaactggataatcaccggaattcgctcccgattggccgcctcagccacccacttaatcgtctcgtagttgaacacgttcacagcagctactccgtaaccgttttccgtggcgtggcgcagcaactcatttactttaaccaatggcattctcttttctctcctctcagtttgttgtctccgtattgaagaacagtgtgtaatggggtaagccctccataaagcgtctgctggctcggtcaatcacatcgtagtcttccttactgaattgccagccggcggctttcaaattctcctgagcctgtcttccgtttttcgctccgacaatcggtgccgtaatcccttgggtttgcagcagccaagcaatggcgccttgggccggtgttttgccatatttcgcactgatccgtgacagtacgtccgtcacttccagacacctatcgtagttttccggctggaacagagccgctcgagcgcgtccgtccgtgaacactgcgccttttttgtactttcccgtcagcaatccctgagccagcgtgctgtaaggaatcaccgaaatctcctgctttcggctaaactccagcaaggcttcatcgtatctccacagcaggctgtagcaaggctgaatcacatctacctgtccaaacttcatagccgccttcatctcttccagagagaagttagacaacccgatcgctcgaatttttccggcctttttcagttcttccatggtctccattctttcctgaatggtaacctcttcctccgctaccggatagtgtaaaaagtaaacgtccaagtaatcggtacccaagcgctgaaggctgtcttcgcaggctttaatcatcttatcgtgggacatagagggcttgaacaccttggagatgattcgcaccttttccctgccaatccggcgggcagcctcgcccaccactcgctcggaacggccatcgccataaatctcggccgtgtcaaaggtattcacaccattctcataggatacttccaacgcctccaaagagcttttgtcctctgttgcgccaaaataatctcctcccatggcccagcaacccagaatgagctccgagaccagtacatcacttttcccaagtttcttatattccattttaaaattcctttctcaaatatgctgtctatgttttggcaaaaattccggttagccgtctcgatcctgtttcggtgagacatgatagtactgcttgtacgccctggaaaaggtatacacgctttcatagccaaccagttctgccacctcctttattttgattgcgggatcttcttccatcaaccgcttggcctctcgcattcggacagacagaacatattccgaaaagctttgatgaagctgctctttaaacacacggctaaagtagctgtaactcatggaaaccatctcggccacttcgtccatgctgatatcgcggttgtaattcttctgcacatactgctttgctatggaaagaatatgggcatacttgtttgtagcggtctgcacagccgtctccatctgcttcaaaaccttctgcaggtattcttgcatttcatttaaactggaaaatctgctaaagtggggaaacgcttccaattccagatgatacgcagaagccatctcctgaacctgagactcccaatacacataaaatcgtcgaatctccttaggaaagagctgctcctgaaaaaattcccgacagaagattttttgaagcaactgatagatctcagcaaaatttctgctctgaaaggccgaatgaatccgggcttgaaaccgcggaaaccggctttgctccgtagccgcttgagcagaggaaaaccgaaggtcgaacggctccagcatgcgataggccatggtgtaccgtgcctctttataaaacacaggatactcctccaaacgcgtaaacggtcgactcactgcaaaacagggccgtcccgccccctgcctgacacaggactcctgacacgtttcgatgtacgtttttacaatgtcctcccggctgctttcggtattcaacagcacaactgtgtcttgcgttacgttgcgagaaaagaatactgctacatcctccgacgcttcctcggcaaagactttctccgcccggaaatcggattcttcttccccgccgaaaggccatgcaacccagaataccggatggggaaattccaccgggggcttgccggttttacccgcgagtaagccgttgagccagttttccagtacctcccggtcgttgccgtttcggagagattgcgccttccggcggcgaagattttcctgacatttgagcagcacttcctgaatttgcaccagctttacgggcttgagcagataatccaccactccgctgcggagagcactccgcatatactcgtaatcgtcatggccgctcagaatcaccacctgaatctccgggaaagcctcgtttaccttgtccgccagctccagacccgtctgatagggcattcgaatgtcgctgattaatatatcaacggacttttcctgcaaaatcccccacgcctcttgggccgagtgggctatcagcgtctcttgaattcctaactggttttccttgtcaatcatctcgatctttcgtcgcatggctgtgcacaaaaggagatcatcatccactatcatcactgtaagcatctgcatcctccgcttttctgtcaaactctccgtcttacttggccaacaccggcgaaaagcacacccgttataagacagcttactgctataatgtttgtaaaataaacatactggtatactttccctcccgactcctcagtaccaaacgatcattggaatgtgaaaagatctgaagtcgatcattgatattatccagcccaattccatgctctttctgatgacgcagagctatggcatcatagggctgagagaatttttgattcatctcctccacttgtttcagactcattcccctgccgttatcccgtacgcggagaaccattcggtcacccatcttgcgggccgtgatgataatttgccttttctcctccggagccattccggtaaacccatgctcaaaggaattctccacaataggctgaagcaaaaagcggggaattgtaatctgccgaagctcctccgggacatgaatccgcagctccacgctgtctccataccggcacttctccaggttcacgtaattaatcacatgctccagttccttctctaaaggaagctctgtgctcgtcatggtgttatagcggatcatctgggcaaaatcgcaaatgtaatccgccgtttcaaactctccgtccaaagtcagctttccggcaaacatgtccaatgtgttgtagataaagtgaggattgatctgaagcagaagagcctttaactgagcgtctttatatgcggtttccttttggatattctcctgcattaagacgcgcattctgcccaagacacggttgaattgatctccaatcactccaatttcatcctgacgttccaccgccaactccccgctgaaaccggattcggcaatgcgctccatctcatctccatacctctgaagacgagagctaacggagcgaagcatggaaaagaacagagacaaaaacagtagcgaaagaaaacccatgaagattaagatgagcagagaactctgctgcaaatattcgtgttccgacactggcagcgccacacccacgcgcagagaaacccgctgaatctcggtggaaaaacaccgcacagattcttgataacctgcggtttgcggaaaacggaaatcagaattcagcgttacattgctgagtttaggtcggttttcctcatccagtaggaatagggccacaccactctgttgcggcattccgaactctgggaacaactcgtccacgcgcattttggccaaaagatacccctgatttttatataccgaggaaacaatgggacaaaggaagtacaacacatcttttccgtctatctccgcatgataccaagtggcttcccttccgttctccaacagctcggtgggaatactcttcggaacagaatcgtaatggtacactgcgctgtagccctccgggatggtagtgtttttcgtcagtaaatagacgcgttccagaggcggtgataccgcgttgctcgctccctgcagcaacggcatcacagtttgcgtgtactcctcgtgagagacggcgccattgtaatcgtgagacagaaaagcaatcagattttgattgcaggacaacacctgcatcagcatttccacatgatccattttttcgttcacatcactgactaccatgttcagcatatattgcccatcctgcgccagctgatgttcatagtgcgacgcaaccgaggcaaaactgaacaccgacagcaaggtaaacggtagagcgatgagccccaaaaatccaagaaccattttgtgcgctagtttcatccgactcagccactgtttcacttttttctcctttcctatcatcaaaaaaccgtattaaaatcccaaactcggtcttttataaaacttacataaaaaacctctggacattttgagattattagcttattatgatatagtgtaacaagtatagcaaaaaatgtcaatttttcctatcgactcgtagtcgacacagctatactccaaaagaaaggaattaccatggatactccacacaacgataaacagcgcaaaagcttattcccctataagcttgttcaaacgcttgtcgggttgattgccgtatgttttcttattttctgtgttcgctcaccctcaactcccagtccctctccctttcagacgacatcctccgagaaagaagccgctttgaaatggattttcataacaccttatggcgaggccgattcctcctacgctgacctgtttccctcccaagaggattgcaccgaattggccggaacacctgtggaactctccttttgtaccattgaaaaatatttgaacatgacagcatcgggaatctctgcagatgtggtcacctgttggtacaccgactccgactttaaacgattggaaacaaccggaactacctgggctctgcaggacttgctgaacaaggaaattcccggctttaccctgcccgaaaactttatccggtggtgcggaaattttcggggagatgtttacgcctatccgcataccggaaccattctctctgaggatacctctatccagtctgccgccgctatgattggtcgcaaagacattctggaaaaaatccactgggatagtcagcagcccctgtccaaagcgtattgcttggaacagctgaaagccgttcggaaagcctatccggagttgatttcctgctacgtggagcttcccagtcttcaacagatgtttggcgtcaccgccgataccggcactgcgtgggaggatcctttttttcaccccggtactttggagtcactggaatttatgaataccttgttccgtgagcgcctactttcccgtgatgtgttcaccctcagccaagagtccctgctcagacagctgcaaaacggcgagatctttttggcggctttcccctcgctgggcaatctgctctccctgctcccggaaaaccaccccatttgggaacagtatgaaatcctctcgcccatcctctcggattccggacgggaaccggcactcagcaacaatttcgaagaacagtacgcctccaccctgtttgttaaaagcagcacgcaaagtcaatcccaagccagactgttggcagcattttatctgcaaaacatggagccttctcccgaacagaaaaacgctttggtacgctccgggcttggagatttgctcaagaatgcggaaccgatgaaatctatcggcatggacagccagtacactgttccgatcattcactatgaaatcctgttttccctctactccaacacacgtctggctacggcagacgaacgaaaacagaaatttctggaaaatcagatcgtgaatttggtggaggattgttctgccgatgaaatcgcgccgacctacgctcgtttggtcagtgagttgcaaagaggagactataagttgctggacacctggaaaaagcagcagtaccaaaaagcgatatccattttgcaggagtaaacctgattttttcgaattctcttgccgggaaataatttttcagataaaaagtgcgccttccaacggctgatgctgatgaaaggcgcgctttcgttatccctgcttcccgcgcaagaaccttggccttttcacattggttccttagttaagagatattaagagagaaacacatctgctttttaggagatgctcttctggtcgtgaagcccctgaacactatgttccatctctcccttaacgggcataatgggtgcgggatttccaaaggtggtattggggaaacggatgggcgctgcccacttcaccgcattgacaatcaccttttgaatttccggctgatgatagatggggaacacctcatggcccggacggaagtagaaaatctttccttttccgcgatgccagcagcaaccgctgcggaacacttctccgccttcgaaccagctgataaacacctgctcatccggctggggaatatcaaagcgctcaccgtacatctcctcgtgcggaattataattttctcgtccagaccgtctacaatgggatggctgggatctacaacccaaaggatttccttctcgccgtcctcacgccacttcaatttccaggtatccgttccgcacagcttccggaagattttagaggcatggccggaatgaagaacgataagacccattccttccagaacacgattgtaaacgcgatccacaatctcatccgacacttcctgatgagccatgtggccccaccaaatcaacacatccgtattgtctacaacctcctgagtcagtccgtgttccggctctcgcagcgtggcggttttcacatccataccggcttctttcaggaagtctgcgatgcagccgtgaattcccttggggtacacctcagccacttccgggaattgaacctcatggaggtattcgttccaaacagttactcgaattgccatttcaaaaaaactcctctcatatcatgaattaatcacagggtagccatttttcttcttccgcagagcggataattacgtccaatgcatgctgaatgcggcagccgtcttgaatggtggcagccatgccatcgctgcacccgttgagaatatctgcaaaggactgcatctgatcgcactggaaacgctggggaatgggaagctttgtgtagattccggacctgtcataggggtagccaaagcagacctctaattcatctacaccgggagtaacatccaagctgtacaccaagccgcccttgctcccgtatatttccatacgctggtaatttcctctgccataggcaaatcgggtgacagagaaattcgccgaggtctttccatccatctccatcaagtaatggcagaagtcatctacatctaccggaccgtatccttcgccctcttccagacggcgctgggtcacataagtatccgtatgtcccacagccttccggtaatttttaccggtgacaaaacttaccaaatccagagcgtgacaacccagatcgcccagtgcgccggttccggtcagctctttttggtatctccaagaacggggcaaatcataggaaggaccgccaccgccctgcaaatactgcatgtaaacgtgataaatgtcgcctaacattcccttctccaccaattccttggcgtagcgggcagcagccttaaagcggtaggaaaagcacaccatattgggaatccctttttcctgtgcggctttggccaagatgtcggcctcctccgctgttaaggtgacaggcttctccaagcaaaacggttttccggcttcaatagctgccttggccacctcgaagtgggcgttgttggaagtggaaatgtcaatcacatccacatccgggcaggcaatcaaatcgtgataatccgcaaagcagtgatcttctcgaataccgtatgtatttctggcgtactccatgcgctcaggctttagatcgcacacggccacaagttccagatccgggcttttgtgaattccgggaaggtgaacgcctcgagaaattccaccaatgcctacgcttcccacgcgaaatacttttttctccatgaaactcctccaacactgtctgttgttctccatatttgatttcttgaagtttcgataaaagcaaagcaagacctgaaggccggaacagccttcaggtcctgctcgaaagctttcctaaaatctcaacaaatcaatatttgtccattagcccgcgttattgtaaacatccagagcttcctgataaatctccattaaacgctccaggcccatttggttcaactgatccacataggcatcccactgctcgtcgatgccgccgttgacaatccagctggcccaggtctcgttaacatacttgtaaatgtccaccgtcagagaagaaatctcttcggactgttcagcggtgtagttcacaacaggatagggctttgccacaaattccttcataatctcgtcttccttcaatttagcgccgtcgccgctatccgcaggaagagtgatcttcgcttcaaactcgggggtcacatacttcggaccgtagtcgcgaggagaaatctcccagtaccactggtcaccgttcttcccttcgggaggatccaagaaggtaatgttgccgtcctcgtccttattcagcaccacaccgtaggggccccagtaagactggacagaaatgtcatcggtagagaagtaatctgcccaacgcatcgccacttcgggatgctcacaagcggtggtaatggtatactcgttgcgatgataaatgatgatttcatcgttgccgcggatgtagcggtcgccgttaggaccggccagcggaggcatcgcaacatattcgtccgaatgaggctgagtagcagaggaggtttcccaagcgataccggtacctaccagagatacatctgcgtttttcatttttgcgtcggacatggtaccatcctgggtgatgaactccggatccataatgccttctgcgtataacttatggaagaaagcaactgcttccttatagcgctcgtcagccggaatgaacacgggcttcagcgtctcctgatccaaagccaggaagttctcctgcaagctgtccgtgaggccccaggggttgatgtagcggatccagtcaaacagattcgtcttagcggtgccggtcagaggaatctcgtcgttcggatcaccgttgccgttagcatcctgctccttaaaagccttcagcacttcgtaccactcgtccacggtggtgggcatctccagacccaaacgatccagccatgccttgttgataaagggcgtatcgcagcccttcggacgcagaggcttcttaccgggcagcgtatagatatggccgtccggattggtaaccatctgacgcatagtgggctctgcctcccaagccgcctggatgttggggcaatacttctccacataatcttccagcggaatgaacatgtcaaggttggtggcaatgtcattatccttcagagcattgtctccgaagaatacgtcgggcaaatcaccgctggccagcaagagcgacttctgctcaccccagtccgcatcgcctgcgtactgccagttgatcttgacgttggtgtccttttccatctgctggaacatggcgttgtctttaaaatccatcgtattggcgcctttgacgtaaaggaaagttaactccacgggttctttgacaataggcaagcccgtctcattgaagttatcgtcccctgctgcaacctcacctgaagtgccgccacttgtctgttccccgctgctagagctgctgttgccaccgccgccacagcctgccagcatggaggtaaccagggccaaacagatcaggctttttcctagctttgtccacttttctttcatgtttgcatctcctcactataggattttttatttgacggtgaaatcctcagggtatattcccaaggtaacgtcacagagtaatttggggagaaaactcaccccttgattgcgccgatcattacgccctgactgaaatatttctgtacaaagggatacatgcacataatcggcacggtggtaatgatgataacggcgtatttcatcaaatttgccaaacgcatggcctcttgagcagccatgccgtcaccggcacccaccaaagactggttcgtgatcaggatatttctcaccaccagctgcagcggttttaagttctcgctgcgtacataaaccagagcattaaagtaagagttccactgcgccacggcaatgtaaagagcaattacagcgattacggctttggagaggggaagagcgatggagaaaaagaatcgcaggttcccacagccgtcaatctgtgctgcatccaacaaatcctttggcaagctggagtcaaaaaatgttctggccacaatcatgttgtacaccattacggagaaaggcaaaaccataacccagaatgtgtcatataaatgaaaatctcgaatggtgaagtaagtaggaatcaagccgccgttaaagaacatcgtgaatatgaaataaaacgtgattaacttgcggcctaccagatctctgcgagacagagagtatgctgcagagatgttgacaatcaggccgagggctgttcccactaccgtgtaaagaatggtgttccaataacccatccagatactcccgtgacgcaacagctctttatatccgtccagcgtgaactggctgggccagagccacacgttgccgttagacacttcagaagggttactaaaagacgcaatgatgataaagtagagaggatacgcaatcagcagcaagatcaagccgcagattccgtacagaataatgttgaaaacaacatctgccttgctcactttttgtgatttatgtattgtttgtgcgctcataatgcatccgcctcttttcgctaaaagttttcagtccgtacattctccgcttaccacaaacttgtgtctccaagttttttggaaaatccgttgaccagaattaacaacacaaagttaataacggtgttgaacaggtttactgccgcagaaaggctgtactgattgctgatcataccgattttgtatacatacgtggagattacttcgctgatactggtattcaacgggttctgcatgagatacaccttttcgaatcccagattcatcacattgcctgcacgcataatcagcaggatcactgcagtaggaatcaggaaaggcagatcaatgtgccacaaccgttgaaccttgctggcaccatccaccgttgccgcctcgtacaaagagggatccaccgctgccagcgccgcaatgtagataatgctgtcccaacctgcgtgttgccacacatcgctccacacatagacgtgctgaaaggcgctcgcctctcccatgatgttggccggattctgaacgccaagcgcccgggccagatttccgtagattccgttgctgggggaaagaaggattaacattatgcccaccataaccactgtggaaataaagtggggcagataggtcaccacttgcaaaacctgcttgaagcgtttcacacggatctggttgaccatcagagctaaaataatggggaacggaaagcctgcaatcaagctatacaagctcaagctcaccgtattccaaatcaggtttttagattggaatgagttgaagaatttttgaaaattctcaagttccacccaagggcttccctgaattccctgtgaaggagaaaaatccttgaacgcaatttgcacgccatacatgggcaagtagttgaagcaaaacagcaacacgactgccggaagtaacaacaagtacaatccccaatttcgtcgaattcctctgccagctcggtatagcttataccgccaacccgaccgctgtcttcccattggattttctgccataaccctcatcttcctttctccattatctctgacaaagcttgcacttgtcaaattggatgttgtggcaatattataaagcgtaagccctgcaaacaaaatggctgaatttatgattatttaccactttttatctactttcacccgatatttattcgaatttgataaaagtcttttaaaaggagtaccttttccgcccggaagcactcgtttttcgcctgtatttttaaccgtcaaaagctatcggctgagtcagagatttgatcattactttttctttttgtacaactgcggcatttccgtttttctttcttgatataaaggggtcctttcccgcgtcaacgtcagcaaaaaagatggctttcggttgagaattttgcttccgcgaaacaacagctcccccttgtgtaaagccggaaaatagacaaaagaagaatatggttttaagcgaggactcaaccaatggtcggttgttttgctctttgctttttgctattgtaaggatgaatttaacactgacggagcgcttcattacgtagctacccaatctatggggaaataggtgtgtaaaaacagacagtaaaagacagccgtgttcccttcaaggcaagggaatacggctgtctggttgaatttatggattctaaagaagatttttattcgaaaacaggtacacgttttaccacgccaccgtccatggcagattggtgagcgcagattcctacaccggtccagtaggcgccgtcaatatcgctgggaaccggggttcgatcttccagaatgcttcggacaaactcgtggactagatgaggatgagaaccaccatggccaccgccttgcaggaacgatagatggggattgctgtcatcatacactgtttgtttggtgaagcgcccaatttccgccggtaaacgatctgcatagtcgggaatttggatacgttcttccgtcacaaggccgcctcgaccgtaatcgttcataacatgttcagcatttgcaccaagcgccatggagaacagtaccggttgttccgattctaactgttgccattcaaaacttttttgttcaccatatatattgaaactttcagtgtaacctcgggctacgtggtagaggaaccgagccatttcaatgcttacatcactgtcttttagggagatcagagctgactcaaaggcatatggacaaccatagggagcttccacttctttacgtactttgccggagcccttgcaatatacggtttccggacgcttgcccagcaacatcaggcaaggcgctaccgcatgggtaggatgcatcagcggagggaagcccaaccagtagtccggccatccttccatatcttgataatgcgcgcagcgcatgaactgtattctgcccagctctcctttttcgtaaaggttcttcacatacagaaactctcgaccatagacggaggtctccataaacatatagtgtttcccgcttctttttcgagcatcgatgacttggtacaattcatcgatactcattcccatcggaatggtacaggcacagtgctttccggcattcatcacctgtatagataggggagcatgagtagcaggcggtgttaccagatggacggcgtcgatggttttatcttccaacatggcattaaagtccgtcaagcgttcttccagaagaaacttatcgccaaccgtattcagcagtttttcattcgtatccactaacaccaaagaatctacgtccgggtgtttcagatagatgggtataaattccgcgccgaaggagactcctacgagcgccactcttaatttaccgtttttcatgttgtatccctcctaggattctttgaaatgatcatacagtgtatccgaaaaaaagtctatggagagaatgaaaatagtatggaataaacgaaactatttattgaattattgtctggctccttttaggcagacatatcataagatcattttactggaaaaggcagatgttcaaccatggatataaaacaaaccgatctctactggtttcagttaaacgaggagattcgcgtggaggatgtcgataagtttagcggcaataatatgcatccggatagaatgatgacgcagtgggtactggtgttgatgatcagcggagaacgctctttccgtgtctacggtgagaattacgtcgttcatagcggcgaatttttcctgttgcctccttacgtgcagcattgcgggcttcaatatgataatcatgcagcctattttgctcattttcaggcaacaggtattcaggttccaccgcctgtaaaggtcgataccaatcatattttgcttccgttacatggacagattcctctggagctgccctgctttgatctgatggagtacgcgattcagcaccgaacattgcctttttcaagcaaaaattttttatcatcccaaattcaggcgattctgtaccagattagtttcgctgtgcaaaaaagagagctttggtgtaatttggaaagcagactggcctaccgaatcttacaatatattgatgacaacaaagaccagcacttgaagaatcgggattatgaggatacctttgggaaaacatacaatcgtctaaatactatattccaaacagtatatggtatgacgatcaaacaaatgcaggtaaccttgcgtgtcaaccaggcaaagcgtatgctcaggtccggctatactatctctgaaaccagtacagcctgtgggtttgaggactatttctactttttgaaagtgttcaaaagcaaaacggggatgacaccatccgaatataaaaattcctgatcatcagttataggacgaagaaccgaatttgtcaaataccgtacagatttttccgtagcggcttacgcgttcggcaattctacggtatccacaatcgtatacccaactttctccacgcgggagaactcgatcgtctgcacctcgccacaaaacggctcaaagttttcttccaaatgccgcgcgattttcccaaggtctgcctgcatatcctgcaaaagtgttgtgtgcggataccacacatctgcctgcatatagtcgggcaagtctttcgcccatttttcggcaatcttcctttgcaccgcttccagcaccccctctttgcgcggcgaagccaccacaatgcaggaggaagccaaaacctctatcttgtcataacacactgggaacaccttgtaactggataatatctccttacaagacgcgatgaacgccgcctcgtcttcgccgatatacgacacaagcgtaatgtgcccgtgcagcgctttcaccgagatgccgagtttttctattttcccttgcagcttcaaaaatcgtgctttggacttcgggtcgatctttgcaatcacgcacagcatgagaatccctccccaaacgatatatttgaaatatatcatgtcgtttcctttgtgtcaaggagaataactgttccgctttttggctattctgtatacaaaaagacctctgtcaaacgacagaggtcttttttcatggggtggaagatgggattcgaacccacggtctccagtgccacaaactggcgctttaaccagctaagctacatccaccatatggcgcgccaaaagggactcgaacccctgacctactgcttagaaggcagttgctctatccagctgagctattggcgcatatctctttatgccgcccaaggcaatcgtcccttttctgcgggttggagcgggtgatgggaatcgaacccacacgaccagcttggaaggctgggattctagccattgaactacacccgcatattctgcgacactgatgattatagcacagaaggttccgttcgtcaacctgttttcttctattttttcgcatatttttcgcgccgggcaccctttttattcccgacggcgggaagttttcaaattttgctttcgtgtgtgaaaccgccacacaaactcccttccgctttcaaaagaaaaatcgcgcagaaaattgacaattcgttgacaatgcgcgcccttttgtgctacgataatactgttcgccgagacaaactcccgaacgatttccgcggcggaatgccgcaaaagaaaggaccgtttcaaatgaagaaaataaccgctgttttgctcgccatgctgctgtgcatgacggtatttgcagcctgcggccagagcggtgccgcctcctccgagagcacatcttccgaaagcagcgctgaagccacggcagagcccaccgccgagcctacggctgaaccgaccgccgaacccaccgaagcgccggaggcattcacccccgccacctatgaagtcgcttccctcaagggcccgaccaccatgggcatggttaagctgatgcaggacgccgaaaacggcgagaccgcaaacacctacaacgtcacgatgtacggcaccgcagacgaaattaccgccggcatcgcgaataagacgatcgacattgcaaacgtaccgtgcaacctcgcttccgtgctgtacaataagaccgaaggcggcatcaagcttctcgacatcaacacgctcggcgtactctacgtcgttgagaccggcgaaagcatccaatccgttgaagacctcaaaggcaagacaatctattccaccggcaagggcaccacgccggagtttgcgctcaactacattctgcgcgaaaacggtatcgatcccgagaccgacgtgaccatcgagtataaatccgaagcgaccgaggtcgccgcagcgcttgccgaggccgataacgccatcgccgtgctgccgcagccgttcgtcaccaccgctatgatgcagaacgacaagctccgcatcgcgctcagcctcaccgatgagtgggataagctcgataacggcagtacgctcgtcaccggcgtcacgatcatccgcaccgatgtgctggaggaaaatcccgccgccgttgaaaagttcctcgaggaatacgaagcttccatcaactataccgagacgaatgcggaagacgctgcaaagctcatcgcacagtatgaaatcgtaccgaaggagcccattgctttaaaggctctgcccggctgcaacatccacttcatcaagggtgaagagatgaaggagaaggtctccggctatttacaggtgctctttgacgccgccccgaagtctgttggaggaacgctgcccgatgacgctttctactatacggaataaccccgcaaagcagaaaaaagtgaaaacaaagaaacagaaagccatagccgccacatgcgctgtggctttttggctattggtgtggcatgtcgtcagcctctgcgtcggctccgagctcgtgctcgtctcgcccgtaaaggtcgtgcaaacgctgttcacggtcattttcgaccccgattttttaaaaaccgtgtggtattccgctgcgcgcattttaggcggatttttcaccgcgctcacgctcggcacggtgctcgggtgggtcgcctcgcggttttgggtcgttgagactctcctgcgccccatcacggccgtcattaaagccacgccggtcgcgtcgttcatcattttggtgctgctgtggttttccggaaaaaatttgtccgtcatcatctccatgctgatggtcttccccgtcatttacatgaatgtcttagagggcatccgcagcgcagacgaaaaattgctcgaaatggcgcaggttttcaggctctcagtcggcaaaaagctgctttacatctacctgcccgccgtcgcgccgtttttcgtctccgcctgctccgtgtcgctcggactatgttggaaaagcggcattgccgccgaggtcatcggcacgccggacggctccatcggcgcggtgttttatcaggccaaaatctttttgcagacaagcgagctgcttgcgtggacggtcgtcgtcgtcgctgtcagcgtcgcatttgaaaagctttttatgcttttgctgcggttggtcttaaaaaagctcaaaatggaggacgtgttaaatggcaagcgtgcataatctcatcgtaaagcgcggtgaagcggaaatcctcaaaaatttctccgccgagtttccggagcaccaagtcaccgccgtttccgggcgctccggctgcggcaaaaccacgctgctctccgtcttattaaatcttctgcctgcggattccggcgaaatccatggctttcaaaagccgagcgccgtgtttcaggaagaccggctgctgccgtacctcaccgccgccaaaaacatttccgtcgccgccgggtgcacggaaacggccgcagaaaaagcgcttttgcaggtcgggttcgaccccgaggacctcaaaaagaacgccgtgcagctctccggcggcatggcaaggcgtgtttccatcgtccgcgccatgctgacaaaaagcgacgccgtgctgctcgacgagccgtttaagggactcgatgacgaaacacgcgaaaaggttgtgcggtttgtcaaagaaacgcggcagcaccgcacaatgattctcgtgacgcacgacccgcgcgatgcaaaagacctgaatgccgcacaaattctcaacatggagccggtttaacccgaaaaaattttttataaatcaaaagctctcggtgtgcaatctgaaacgcagccgagagcttttttcgtctaattcaatttttattttaattttttcgacaagtacagaaccagttcgtcatcattcacgcacggcacgtattgctctaacacgtgtccttcgtaccacacgccggaaccatccggcacgtatccgcgcagcacgtacattctctgtgcggcgccgtagccgctgtgcagacccacccccaggcacaccgtgtccgaggtctccgctgccaacgcttccacctcgtccatcaacgccgagccaacacccctgccgcgcacacgctccaaaacggcaaaatcgacgatatacggccaatttgtgttcgcaaacgggccgcccgcctttttatagagattgatataccccacaggcttttcttccagctccgcgcacagcggaacacagctttgcgccgcaaaatcccgcaaccgcgtctcaaatttttccgccgttgtcccccaaccctgcgcctgctcttcaagtacaagctgcgacccgtcctcttcccgcaaaaggcggatcaaaatctcgccacccttgattttcaccgttttcggcgcaaaaatcactttttcttccatgttatctcctccataacggctaaagcgccgttttccttttagtttacataacacttgcgcgcttacaatttcttttccattacaaggcttcgcaccgtcatgccggcgctttcataaaaccgcatcgccgatttattaaacgaccacaccatcagctccaaagattccgcaccgcggcgcttcgcttccgcctcgctcgcatacagcagcgccgtgccgatgcccatgccctgtgcctgcggcaacacggccagctcctccataaccacccgcacacgcgacaaagtaaccgcatccccggcatttcctcgcattaccgtgcgggcaagccctaaaattttgccgtctcgcaccgcacacagcatgatttcgttcgggtcatcgcacattttgaaaaattcgtcttcgccgagcgggacattcgtcttcctgtaaatatccgggcgatttgcttggtgcagcgcatgcacaaacgcaaaaatttccgccgcctgcgcgtaatcatcacgtccaagtgtgcggatctcaaagttttcaacgttcttcggcatagcttctcctctcctgcggcggcgcatcaagcgtgaccgaaatattatccttggatatccccgttttcagcgcaatatttttcgtgatttcctgcgcagtctgccgccgcatacgcccgttccccgccggaaacagcgagatcgtgattttcacaccgctcatccgttgttctgccccaccacactccacaggtgcaattttttcgttcctcatacaattttcggagaaagccaagcaattttcttctattaaagaatatccctcttcaaaatatgcgggcaaaaccgaaattttcaggtttttttcaatgcccgtcaccgtcacgtcccgcacagtctgcacgtcctcgtctttccacgcgccaaaaaattcgatccgcaccataatcagcattcctccgcatcattcaaacatggcacaaacgctctgtaactgtgtcaccaattgtcaacgtattttcctcgcagccccaatttctttattattatactttggacaaaaccgcattttaaaagtgccatcgttttcaatataacaaaaaacaggatacacatttgtgtatcctgtaggttttatataccctgaaaactgaataaagggagaagcaagagttcaatgggagaagaaagcgcaatcttgaaccaagaaggattatggtcaagccctcgacctattagtactgccaagctgaacacgttaccgtgcttacacatgcagcctatcaaccttgtagtctacaaggggtcttactagcttacgctatgggatatctaatcttggagtcggcttcacgcttagatgctttcagcgtttatccgttccgcacatagttgcccagctgtgccactggcgtgacaactggtgcgccagaggtgcgtccatcccggtcctctcgtactaaggacagctctcctcaaatatcctgcgcccacgacagatagggaccgaactgtctcacgacgttctgaacccagctcgcgtaccactttaatcggcgaacagccgaacccttgggaccgaatacagccccaggatgtgatgagccgacatcgaggt

SEQ ID NO: 1688 - DNA, 13949 bp, Unknown
  gut microbiota DNA sequence
ccggtacagtttattatttagggaaaaacagaacgctttctttaagtatcacctgcgataaatacggtaacatttcttaatttgcgtacaaggtttcactcaaatcccatattaaaggcggctactttcagttggaaacagccgcctttcttttttaacattctcatatctataaacactcaaagattacagcaaaaacctgcctattctaaaacaggcaggttttatcttgtagcctttattattccagcaccccgccgtccatctcgtgcaccgtgtcgcacagtgccgcgatgtcctcgtggttgtggcttgcgagcaaaatcgtcttcccttgtgccttgagctccaacagcagtgcccgtatatcctgcacaccggcgttatccagtccgttcatcggctcgtccaaaatgagaatttccgggtcttccatgattgcctgcgcaataccaaggcgctgccgcatgccgagcgagtattttcccacatgcttgcggctttcgggatcaagccccaccgtcttcagcacattcaaaatctcttccttgccgattttccgccgtatgttcgccaaaaagcgcagattcttgtacccgctgtaattcggcagaaagcccggcgcttcaataatggctccaatgtcctccggcatgtccacgtcacgtcccacacgcttgccgttcacgaggatcacgccctcctccgggtgcatcagaccgcagatgcacttaaaaagcaccgtttttccggaaccgttgcgccccacaatgccgtgtatctttcccttttcaaacgagatcgatacgttcttcaaaaccacttggtcgcgaaaacgcttcaccacgttttgtacttcaatacaattttccataggaacttctccttatgatattataatatctttgtttcgtataatcataaaagaacataaccagaagattaagattgaaaggcaaaaaaaagcaaatgcatattgaatagatggcatacaactaattcctaaaaaatctaaagaatctaaattaacccatgaaattggagaaaaatatgtcatcgtatagcctgaagcgttagatgaaagaaattgaaacagaacaaacatcgaaccgacgatagaacctatcaatttactaaaagctaaatttaataaaaacactatgctaccaagaaaaattgcagcaagacacgataaagtaatcgaaaataccattgcatttttaggactaaaatgtaaaatcaacgctttagaaatttgaatcggtaaatcgactaattccgcagcatttgtattcgcaagcgtataaaacacccggccccaatcttgcaaagccacacaatcaaacaagttcattactattgtaataataactacaaatagaacatacgaaatagatattataatcgtgtataataattgaccgaacatccatacagtacgaccacatcgcaaaaaaagcaaataagcattctcctcaatgtacggtgcatcgcaaaataataaaaccaggagtaaaaatagcaccaaaacacaatttcggtttgccattataaaaggaaagagccaaggggttatcggttctcctgctatcaatatatactgatgcagcgcatccccaatcattaacaaatatagtattgtaataattccaacaataaatattcgtgaatccgagagcaatcgacgcacaccatatagaaagacatggtatatattaagcaaattattcattccatactcctattcgcttccattataaataacgcactggaagctactataactattacaaaaactaccaaagaagtcgcggtaccaagtgtttcccctcttatcaataaagcaatatcgagccatggaggtaaccccagtatccggcataaacgcaaccacaaataatatagaataatcggggaaaataaaataataagtatatttttagttcgggatgatatatacaacgccatactcgaaaatgcagatgcagatattgatttaataaaactttttctaaatatatattccaatacactacacccatacaacgataaaacctgttcagaaaactcatctgttgtaaaaggatagcgcatttccaacgcacatataaataaaaaatcgccgatcaaagaaactgatattgccgtaaatactgttattactacctttgatagtagatatgctattttactagaacgcaacaaaacatttctctgataactttcgtttttatcaactctaaaaagaattgttcccggtaaaacagataacaagagatacaatgtttcaatgcccattatacctgaaatcatatataaataagctacgcaattatctgaacctaaaagcatatcccagtacacactcagaaaattaaagaaagcaactcctaaaacagcaaatacaaatcgcttagtgcaatagctacgatatgcatcttgtataaaagtgctaaataatttttgcatattactcctccgaaatttctaatcccgtttgagcatcgatcatatatgaaaattcataagaataggcggtgtcatttgatgacctcattgtgtcatccccttccgcaagtacaactgctttccacgccggatagaagagtacctctttatgtgccgtatcagcaaactgaggataatatcctagcgctatacttttaattgtatactgttctgatacaatcaactgaccaagctgcctttctatttcctctttcgcttgattctcggtcataatttctttcttttcgagttcttcaactatatttatactatttgaaacaacaagcaattgtaacccgttttctgtaactattgaaattatttcttctccagttatcatagtgcctttttcagagcttccatgaacatccgtaaaaacttttttatcattcagcttcggtacagcatataaaaaataacagtctttccatccatctaaattctcattgccaccaaatttatctatcataactttttctttttccttgagtgtttcagaatcaagattatagcaattcaccaaataattgttttccaatccaatagcctgtaatattttataaaagtcttgtaaaacttcatcatggctcttgaagtttaagtctccatctttttcaaactgatttgcgttatacatctgatcggtttcattatatcgaaaaacttgtaaaacaggtaaaacttcttttacatctgaacttaaatatgaaaccataccttcatctactgtaactgtacatttttcatctgtaataatatacccactctctttcggtcccactccatactgtgtaattttattttcactaagtttgaaagcactatttataacatcttcagaaaatatggaagtaattcctttaaacaccgacattgataaattcacattatcttttagtattggttgtgagctgacaaattcttttccagagctaatatctttggattcactagtaatattcaaactatttgtactttctgttgttctacatgaagccagtaaaatcaacacacacagtataagcagtaatttaatttgtttcataataagctcctttattgataggagtgaagcaaaattaaattttgcttcactccggcatcatctattacggttcccagttcaatgtcaaagctgcatactgatatggattgctgtcggcatattgcgctgcgcatttgtacgaatagccaaatactccatatccggaataatacaagggtgtaaaattacccgcatatctcgtttcaactaatgaagacgcatatacattatttgtatctcgggctcgagcataaatcaactctgtcccttgactccacgcatcagaaacatttttatcgggttggatattaaccttaaaataattttgtgtattcaatttcacacaagcatttgtaagataagctccttgatttttgtacacacgtatcgtgtctgtccaagcatacgcgctcgcagacatggaaaacgcagaaaccgccattaagcaagctgccacaccggctataagccttttctttaacatacaattgcctccttaaattatgtagattttgcaaggaatgtgtcgacccatcccttaatttatggtcataatatcacataaaattacagttgtcaatataatttatgaaaaataggtaacagcatttgcttaaatcaatcaaaaatttactttttcattgccggtttttgtttttctttcctttcactgctaaactgaattaaccctaacgggaatttttatctaacaggagaggtttacaatggaaagaaaagtctgcaccatcggagaatggctggatgtttggtatgaggtatacgccgtgccagaatatgccccgaaaacgctcgaaatttaccgagatgcccgaaagaggttatcgcggcgttttccggaaatcgaaaacacacttcaaagtgcgccggaattcgccgcgtatcgccgtacatgctgcgccataccttcgcgacccgaatgattgaaaacggctcggatgctaaaagctttgctcttatcatcggccactccaaccctgcctttacgctccgccggtacgtccacccggatcacacatccctctacgagcaaatgtgtcgcctttcaagcatacagcagtaaaccggcaacattgccgctttttaaaatagaaaaacctactcaccactatcggcgggtaggttttacctttgctatcctctgctttttatgcgtaatgaacgatttggttaagggtatagatctgcgtttcgttttctgccgcatgatcgataattttcttgtcaaatccgttttcagaaaatagtgcatagtgaaacttggctttttctttcagcggagaaagctttgccaccgtgtcacagtactcagaataagaaaacggtacgcctttgaatttacattcacccaccagatattcctttgcccctcggtcaatacagagtatgtcaatctccgtctctgctgtccgcagtccggaagctgctttctcgtctcgtaccgtagtctttccaaaccaacgtcccatctttgcataacggaaaggcagctcgtttttcttctgcatttcacgaacaaattcccggcaaatatcctcaaaagtaaaggaagcaaacttgtggagagccggttttacaacatactcgtatacgccgtccacatcgccgtcctcaagctgtgaaaaatttgcaaaaccaaaggcataccagaaacggaagaagttatccgtcagacgataggctcctcgaccggaatttgcctgttccttggtcttagcatccacggaaaactcccgttccacaattccaagctctatgagatttttcaagtaaacactggttttggaagtatcctccacaagcgacttttgactgatgtcgttgagcttggtattgcccaacgcaacagcttcaatgatagagttgtagataggtgtttcccgcagctcctgatgcaacaaaaactccacctcgctgtaaaggatgcagcctttagtcagaatattgcgcttgatgttctcgtcaatggacagcccgggattccattggcgcagataatgtgggataccaccaagaacagcataagccagcaccttatcacggtcagaataatccggaaagaactttgcggcatcataaaatcccatttctttcatcttgtagatacccgtagccctgccgtaaagtgggtttttctctgccagcaattccttttcgataaagctcatggcactgccgcaaaggataatcattacgttggcatcccgcagctccgcatcccagagattctgaagaatagagggaatactcttgttaccacggcacatatacggaaattcatcgatcaccaacaactttttccggtcaccgtatggtagttcccgtaccgcacggaatgctctttcccaatcggtaaattcagtaatatagctttttgcaggaatgtcttctctcagcacccgagcagaaaagttacgaagctgtaccggatcagtcgtttgcgtgcaggaaaagaaaacatggggctttcccttacagaatttccgcagcgtctcggtttttcctacacgccgtctgccgtacagcacaatgagttgaccgccattctctgaatatttatcattcaggaatttcaattctgtctctctcccgataaacatcggcacacctccaagtaatacaaatttagatttagcaaatcttgatttgatattattatattcaagatcagtgaaaaaatcaagaaatttttcaagatttgcataacaagttcattacccctgtatgtttcctattgcccacgtgtgaaaactcattaagttcaataacacgaaatgcaaataagtcgctgcaacaaatttctcggagcaaaagcggcaatattgccgctttttaaaatggaaaaacctactcaccattgttggcgggtaggtttttgtctttgttgttctctgctttttcaaaatccggcaacattgccgctttttgatttctctctgcggcaagggcacgtgcctgcacaaacggcagcttaccgcgcattaagtgctgcttttctcgcccggtaagctgttccaagagctgcttataaatgcgcaccgtgcgttcggaaacgccgagaagctgcatcagccgcgtctgtaaaccgcctttgatttcacctgcgtccttcatgcctttcagtagcttgtagtaattctcatagagttggagccggatacgcggactttctgccgcctgctgactgcgatgaatttcccggcggcgccgttcacgaggatcacgtatctgccgtttgatcttgtaaacatagcacgggattttcgtccagtgcagacactctctcagataccaaaaccgatacgcctccagaaatacacggtatcgaccgtctgcttcaagtgtcacaccgatgggatattgcagtaactccatcacgtccggcttagaaagcttcgagttttcaacggcgtgataacttacttcgccgggcatgtcaatcctgtctgcatcgatgagatggcatctccattttacgcggtttaatcccgctgcattttggcggcgagcagaacaaggtctgcggcatcgggcctgccattttcatttaagtcggcggcaagcgcggctgtgtcggtcagttccgtctccccgacgagcacacgctgcaaaagacgcatatcggccgtattcacggtgccggaagcgttgatgtcgccgggcacaatgaccgtatacagctcatcgtcgatcagcgcgctcatgccggttttcagcctgccggagaccgctgcggaggatgacgtgtacacttccacttccgcctgtgggaacgctgcccgtagctttgctgccgtaacgcccggatttgcgtataaaatgtggccggaaacacgcaacttcgccgtgacatccggatccggcgtggcggtcggtttcggtgtagctgttggcttcggcgtcgtgctcggtttcggtgtagccgtcggcttcggcgtcatgctcggttttggggtagccgtcggcttcggcgttttagagggctttggggtcgcggtcggctccggcgtaggtgtcgggataggcgaaggtgtgggcgtaggctgcacaaatgtaccgaacggctctctgcacagtgcgccgttttgccagatgatcgctgcatttgcggtgagtgcagccgcttcgccggaaagcgtgaagaactccgccttgtcgccgcggcgcacacgcgagacctccgaggtgtccgaaagccagtagagcatgtcgccgctcaaaacggcctccgtcacgatcgtgtcttccgcccactcttctccggaaaacaagcgcacttcgccctgcatgttgacgtacacgtcgctgccaagcagcttatacggccgcgcagccggcgcataggtaaacgccgtgccggaaagtgtcggcacatttcccgcaagcgaaatctgcacggcactttccgaaagcagcacataaagcgtactatccaccgtctgtatgccgaatattttatcttcaaatatgaattccgttaggggctcacccgccgcgtcaaacacttgcaatgtgctcggcgcgccgtaggtaacagcataaagcctgcccgcgctgtcgctttccgcaaagcgcaggccgctcgtcacaggcaaagcgaacaggtctgtttcctccaatgtttccgcactgaaacgctccacggcaaggaactcctccgtttcggcgaaaaccgtcacggtatcgccatgcaaaacggcatattgcccgttaaacggtgcttcggcggaacgaccgtccgggcgatacagcaccgtcgtacgaccggtgtagaccagtatctcgctttcaccataagtttcatacagtaaaacctgcgcatccttgtcttccgtgatgctctgcggtgcaaatccgcaaagcaaaagtaaaaagagaattgccgcagcacccgcaaaatatcgccgctttttcatgttttcgtcccctctctgcgccgaacgaacttcttgacaagagtatatcgtaatccgttgaacatttaaatagtttttcggcaatttctgccatattttgcaattttctaacaaactcgccaaatggcacgggcgattctacgacattttcacatacaaaaaatcgccggagcgcacttgccccggcgattttccgcatactatctgctatttttctgttattttttgagcttacgcccgtcttctttcgcaaaatattcctttgtcagcttcaccaccgtgccggaaagcaataacaacgcgataagattcggaatactcatcaggccgttaaaggtatcggcgatgttccacagcaggtcaaggttgacggttgcgccgaggattgcgacgaacgaataaatgacaaggaacggacgcacggccttactggtgcggaacagaaattccacaaaacgcgagccgtaaaggccccagccgatgatggtcgagaacgcgaagcagcacagcgcgaccgcagagaaaatggaagcccaactgccgtaggtcgtcgtaaagccggaaatcgtcaggtctgcgcccgccatggtgccgtaattcaccgccgtgccgctgcacaaaatgacaagcgccgtcaatgtgcagatgacaatggtatcgacaaacacctcaaaaatgccaaacacaccctgttttacaggctttttcgtatcggcgcaggcatgcgcgatagaacccgtgccgaggccggcctcattggagaaaatgccgcgggaaacgccgcgctgcatgctgatgaacagactgccgatggcaccgcccgtgaaagccttcgggttaaacgcgccaacaacgatcgatgccagtacctccggcagacgcgtaatgttcaggacaaccacgccaagccccaaaagcacatacaaaagcgccataaacggcacgagcttttcgctcacactgccgatgcgcttgatgccgcccagcagcaccatggcaacgagcattgcgcataaaatgccgatgacaaggttcaccgtgggaatgtggtccgcgccgatcacattgtactgcgtcagcgccgtatcgatagcggttacaatggtgttcacctgcgtagcgttgccggtaccaaacaccgtcagcgcgccgaacagcgaatacagcaccgccaaaaattgccagtgcctaccgagaccgtttttaatgtaatacatcggcccgccgacccactcgccggtcttgctgcgctcacgaaaatgtaccgccaacgtaacttccgcaaactttgtgcacataccgagcagtgcggaacaccacatccagaataccgcgcccggaccgcctatcgcaatagcgcccgccacaccggcaatgttgcccgtgcccactgtgccggccagcgccgtgcatacagcctgaaacggcgtcatggaaccgtccgaagcatcttttttgcggaacatgcgccctgccgtggtgcgcatggcataggggaatttgcggatctgcaaaaagcgcgtgcggaagcttaaaagcaagcctacgccgatgatgcagaccatggccggaacaccccagataaaatcgttcaccgctttgtttacggcagctatgatctctaacatgatcttccaactttcgtttctcaaatttgatgcgtttttcacttttctttcaggcaaagtcgaaaaacgcagaataatctttttaattatacacacatacgtaaaatgtggcaagtaaaaatgcgtatttctttcgcacaaggtcggaagacaaaagtaatttgttgaatcgaccaaatacattcagctttataaatcttttaaccgataaaatctatcttaaaacagaaaaaatccacaaagaccgaaatctttgtggattccttggcgcgcttgaagggactcgaacccctgacctactggttcgtagccagtcactctatccagctgagctacaagcgcatttctcaaacagcttcatcattataagctcaaaagtgcaatatgtcaaccccttttttaaaaaaacttcaaattttctccgaaaatcttattttagccaaaaatacttgcatcggcatttttattgtggtattgtttgaccaaagactttattcgttccctttacaccaactcgatttcatttaggaggcgtttactatgatcgatcttaccgaatttgaaagccgtgcagtgccgcttcgcgcactcggcgttgtggtctcgcaaaacggcacgcagctggcccgcaagctgtgggacgatgcctgccgccgcaatgtgtattccgcaagcaaaagcttcacctctatggcagtcggcattgcgcaaaaagagggcctgctctccatcgacgaaaagctcacggacgcattcaaggatgacctgcccgaaatcgtttccgacaacttaaaggccgccacggtgcgcgatttactcaccatgtgtctcggacaggaaaagagctttttaatgggcggcgaacgcccgtactatgaagaccgcaactgggtgcgccttgcacttcgccaaccgttcgtgtacgcgccgggcgaaaaattcgtgtacaataacgtcggcccgtaccttgccggcattctcgtgcagcgccgcgcgggctgcgaccttgtccattacctgatgccgcgcatgttcgcgcccatgggcattcagctgcccacatgggaaaatgacctgaacggtcagaccttcggtgcaggcggcctgttcctcaccatcgacgaactgcacctgttcggtcagttattgttgcaaaacggcgaatggaacggcaagcaactcatccccgccgagtgggtcaaagaagcgacctcaaaacaggtcgaaaacggcagcgaggggtacggctacctcttctgggcaggccccgagggttccttccgcgccgacggcaaatacggccagttcgtcattttgatgcgcgacaaaaatgccgtcgtcaccgtcaccgccgaaagccgcgatgccggtgcactgctgcgcgccgtctttgaggagatctacccacagctttaaaatttgaatcacaagcaaaacggcgccgcacagagataatctaccctgtgcggcgccgttaccgcgtgctccgtattttcgtattgagcgtcctttcgcagcgcttttcagccttccgcagcttctaacagctcaggctcgctcgtttcagttgttttattatattttttataatactttgttgttttctgacggtacagcatcaaaaggccgcgcacgcaaagctccgttgccatagccgtccacatgcccggcagaccgaaattgccgacgagcagcagtgcaagcccgatgcgcaccacccaaatactgccgaggttcatcatactcggcacgaaggtatcgccggtgccgcgcagtgcgcccgccgcaacgatggaaacgccgtacagcggttcagccagtaacccgatgcgcaacgcctgcgccgcaagcgcgcggacggagagatcgggcgtcaaaatgctgaatacaaacgggcacaggaacatcatcaaaagtcccgttatcgccataaagcccgcgcccatcacgatacagatgttgccgtagcgcttggcaaggtcggtctttcccgcgccgatgttgcgcccgacgagcgtcgtcgccgccgagccgataccgtagcccggcatgtagcacaagctctctgccgtcacggcgaaggagtttgccgcgatggagactgcaccgagcggcgcgatgatcatggtcgcgacgacctgcgcgctgcacatggcgatctcctgcacgccgaccggaaggccgatcttcaaagcttttttgagaatctccgggtcaaagccgtgcttttcggtctctttgcggttgagccgcaaatgcgggttgcacaacaggcagcgccacgccatcgtcaggctgatgaccgcacacgcactcgctgtgccgatgcccgcacccatcacgccgaaatgcggaatgaaaatagtattgaacaccacatcgagtaaacacatggcggcgtttaaaatgctcggcgtcagcatatcgccgctgcactgcaagtacgacgagttcagcgagttgatctgcgagaacggaatcatcagcgcgtacaccatgaagtatttcgaggcatcgtaacgaatagccgggtcgccgccgagccacgtcggcagcatgctgtggatggaaagtcccaacgcgcacaaaatccctgccacgcacagcgccgtgcacaggccgtgacgcaccacgcttctcgcttccgcatcatttcccgcgccgatgttatgcgccacctgcacggaaaagcccgccgaaacggcgtatgtaatgccgcccagcagccatgtgctcgtggataccagaccgatcgccgccgaagcgttcgcaccgagcgaacccaccatggcggaatcgatatattgcatcacgatggttgtgatctgcgttaaaatagccggcaggctcagtacccaaacttccttcacctgcggcttcagttcatgccagcttatttttttcatgtctcgctccccgtttcttcaaaatcccctgttgtaaaatagcggtgcatcacgccggaaaaccggaacagctcctgcacaaattccgggtctttatctttaaaatacagccgaaaaagccgctcctccgcctcatatacgggctttaaaacctcattcgcgtagtctctgcccgcttctgtcagcgttacggaaagctccctgcgctcgccgggaatggggctctgcaccacaaagccacccttttccagctctttgataagcgtattcaccgtcgttttcgggaatccccagtcccagcagatctgcttttgcgtgtgcccctcgccgtcgttcagcgccgaaagcagccacagcatattcggtttgatctgcgcacttttcgagaacacatcgtaagctgcgtctatgccgtacaccgccttgccaagctgccggaaaaacgcatatcgttccatttcgctccaccccgctaaaatacgaattcgtattttattttagcacgggtccgtacaggtgtcaaccacggtgtcgtgtaaatcgtaaatattttttgaataagaatgtaaaccccccgccccgggtaccggcacaaagccgattcccggggcggggggttcattacttttaaattttcacattacttttcgtgtctcttctttttatagatgagcaccgctgcaagcgcgcctccgctcagcacgagcgccgcgctgccgaaaacgaccggcaagttgctgctgcctgtcttcgggttattggggtctgccttcggcgccggagttggtgtagccgtcggttttaccgtaggcgtcgcggtcggaaccgccgtcgggcttgcagaaggcgtggccgtcggttttaccgtaggtgtcgcggtcggaaccgccgtcgggcttgcagaaggcgcagccgtgggtgttgccgt

SEQ ID NO: 1689 - DNA, 191452 bp, Unknown
  gut microbiota DNA sequence
cgatccagtaatagccaaggtcgtagtcgttgtgtacaccggcgagaaaatcaaagcagtccaaattctgggtcaagttgatcagctcccgcacactgccggtgttctcgcccaagtccaaaactgcctgccaaaattcttcgctctcccgcagttccatgatctgcccggcaaggtagttcaattcgctcaggctctcgtattctccgagcaccttgccgatggccgcatccgggcagtcatagtcggtgataaaccattcctcatagcgccgcccgatgccgatgcgccggaaaacctcctgcatttcttcatttgtcacggggaacttcacccattcgcccaccaaaaagccctcgttgtatttgccgaggttggtaataaaggcttcaaaagcgcagtcccttgtatctggtacattcatcatagctgcctccgttatcgctcctgcaccggcgcctgcctgcgggggatgggaaagccgtaaacatgggcgatctcgtcgcccagcctgcgggtcactcttgtaatgtccgcacgagtggcaatgccccggtagattttttctttcagattctcgatctgcgtgtcgctcacgctgtccttataggcacggtagaggtaatggttcgtgccgtcgtgatggatggcgtcacagcggaagtcgccgtttttatccacataccaagtgctgtaatctatgtcccgttcgctgtaaaggcagtcccggatattgccgctcggaatctccttataccccatgcgacggccgttccaaagccccagatcaccgacaacgagaatggggcgggagagctgaatgtccagattggagcgctcgtcgtccagatagtcgctgttcagctcatacatcagctccatacgctcggcttcggtgaggtcggggtattgctcctccaactcctcccgccagtcgtcatagtcaatatcgttgctccaaatgatgtgtctgccgtccttcattgcgtccgtccctcgctttctgccatcaggaattgtccgaactcggtaaaggcgtaccagttcgtgcggtcaaagcggctctcgttgaaccgtcccttggtgagcacccgccccttgaccagccgtttcagggcatagcggatctcgtcgtaggacaggaacgggaaaaagccggtcatcatctgcaccgaacagcgcacccaaaccttgccctcatggagctgcggcgattcggcacttttctgctcggtacaatcccaaaggaagcaggccagcaccgccgcattaactccgtattttttcgctatgtccgcatcaaagaaatgaaccatgatttttcctccgttcgttctgaaaaacacaaagcggcttttcagccgcctttcggaaagtttctatacagaaccacatatagctgtgatctttctttttcgggtagtacagggagtaacagggggtgaggtgtggagagggggggagaaaatttgcgcagccgtttcacttccgcaaaagggcagactttccctaaggcgtcccgttatctttcctgatcgcgtcggcgctgcaaatgccgattgtaaaattccagtgctcggatcacaaaatcagtttcctgccctcgcgggatcgatttcggaatgagcctcgttattcgctcgtcgcgaaaagtgggcttttcacgctggttcggtttttcctcctgcataatggagagaatgacttctgcggacagctttccgtcccgactgaactctttcattttgatggcctgcgccaacgacggcgtgcagtcctcacactccatcgtgtcgtataggctctgctgctgttctttggagaggtaggaaagctccacggcgggacgaaaagcaatcttgccgctgtccaccatgtccagcatcggtgggatcagttcagtcaggcgaatataccgctgaatttgtgaacggctgtccgggctgcttgcagccagttcctcattagaacggctaccctttaacttcggctccagtggggtcgaagttaaatccgaccgctgaccctgccgttttatggcttccaacttcatcttgtaggcaaatgccttttcggacggcaagatcgtttctcgctgcaaattgctgtccaccatgatgatcgtcgcttcatcatcggtgaggttgcggacgatgcagggcatctcggtgatgcccgccaatgttgccgcgcattttcgcctatggccggctaccatttcatagccgccgtccgctttggggcggacaaggacaggaaccagcacgccgtactgctttacgctgtccgccatctccgccatagcttcgttctgcctgattttgaacggatggttgggaaagtcggagatgtcggcggggttcagcataacgaccttttcaagctgcgcttccgcacggctctcgtcggtggagaacaggtcatcgagcggcgtcatccctaaatctctcggctttgcgctcaagctccgacacctcctttgtcagtgagcggtatgcggcggcaaccttgccgttcttgtcgtgagcaaagatgctcttgcccctgccgctggtttctgcggctcggacggaaaagggaatttccgtcccgaacacacggatcttttcgctgtagtgggcacgcagagaggcgatgatctccttggcctcgttggtgcggctgtctaccatcgtgaacaggatgccgtcgattttcaactttgggttgatctgccttttaacttttgcgatggactgcatcagcaggtcaagtccctttgctgagagatacgacggctgggacgggatgattacgctgtccgctgcggccagtgcgttgatcggcatcataccgagcgacggcatacagtcaatgaggatatagtcgtaatggggcttgaccgcatggatatatgtccgcagcacgctttcccggctcatggcgttgatcagccggatctccatgccggacagttcaatgttcgccgggagcaggtcaacgccctcaccgtgatgcagaataccgcagccgtccggaataggggtatcgtcgatcacattctgcatgatgtctgccagcgtaacgggcagctcatccggcttcgggtagccgagggagagggtcaaagagccttgcgcatctgcgtcaatgagcagcacccgcttgttttgctgggcaagcccgatgccgagattggcggtggtcgtggttttgcccacgccgcccttttggttcgtcaccgcgattactttgcaattcgccatatggtttttcctccttcacataaatttagccgcctgcgatgaagcagacggctatgtaatattaggaacgatataaattcaaatggttgtaaaaacgaattgatattattccgataagatgttatactataagcataagcgaaaagaaaatgttatgtaggcggtgaacgcaatggaatatatgaaagtcacacaggctgcggaacaatgggggatttctgaccgtagggttcgtattctgtgccagcagggaaaaattgagggcgttattcaaaaagggcgctcctatctcataccgtgcaatgcggtaaagccgattgacgggcgcaccctccgtcataaaacggtatcggaacaatatttgccgatgctctcccgtatcgacagtataaaggaacagttagaccagcgtcgcccacttacgacaggtgaattacagcgattgcaggaagaatttttggttgaatatacctacaactcaaatgcaatcgagggaaatacgctgaccttacaggaaactgcgcttgttttagagggaattacgatcgatcgaaagccgctgaaagatcatttagaagccgtcggacataaggacgcattcctttatgttcaagacttggtgaaagaaaaagctcctttttcggggagcattatcaaacagattcacacgctggttttgatggatcgaccgggggaccgcggcgtttatcgacggattcctgttaaaattatgggcgcatatcatacgccgccagagccggttgttgttccggaacagatggaaaagctcgtaaaagagttttcaaagaaaaaactgcacccgattgagagtgcagcgctgtttcatttgaaatttgagggtattcacccctttgtgaacggcaacggccgcacagggcgtttgatactgaacctgtttcttatgcagaatggctatccacctatcaatgtgaaatttgcagaccgtaaacggtattatgaagcatttgatagttattatcgtgataacgatgcgggggccatggttcaattgattgccgaatatgtagaagaaaggctaatcaggtatatagaaattacgaattagggaggaatagaaaatataagcaccattggtaaagccacgctgcagtcagacgaaaacggtttggttacgcttcaatgcgataggtgtaaaagcagattcaaaatggattgtacttatttgaatgatgaactgagcggggatatttgttgccctgtatgtggaatatcagaagcgttaaatacattttggcctcatgatctacggaggattgccgcagatcgtaagtttccagagcgaacgacagaaagcagaaagtatatcggtgcaaatctgcttgtccgcaaacagcagaaacatatttaacggcgatccttacgcagttaacgctcatacagaagcaactgcatacagatttacaattcgttttggcttcatttcttcgatgaaatcagggctttttgaatgatctgcattatcgggatcgcagcgcttttttggaggtttaaattcggtaagactatgtattttaagtccaaaactcaactgcttgtcctctggacgaggacaccggagcatttctgtcacgtatgtaggcaccgaagaactcgctcatctcgagatggtggggacaatcgtgtaccagctgacgcggaatttgacgcaggaggaaattcaaaagcaaggctttgatgcgtatttcatcgaccacacgacgggcgtttacccggcagcggcctccggcgcgccgttcagtgcagcgtgcatcgccgtaacgggcgatacgctggcagacatcaacgaagacctcgccgccgagcagaaggcccgcgtaacgtatgacaacattctgcgctttgcggatgatcccgatgtgcgcgaccccatcaagttcctgcgcgagcgcgagattgtgcattaccagcgctttggcgagggtttgcgcatcgcgaccgatcgactcgattccaaaaacttctacgcgtttaatccctcgttcgactaaacaaaaacgggcggcactttttcggtgcttgcccgtttttcctatggcttacggcgaatttgtgactttttagacgattttgacgcaggattaggaggcaaaataccctgaattttcctgcgaatgcgacaaattcacggggattcgggcgcaaatttttccgtactgttacaaagatttaatgaaacggcgaactttgcggtaaaacactggcgattttctgcacagtgtggtatactaactctgtttaatgcggaaaagtgcggctttccgcaacggcaaaatttggcagcgtgtgtttggggtgcgggcaaaggccgcacgctatgcgcaaaaatggaacggcgctgcacagaaaggggcgaagcctctgtgaaaaaaagaatactgctcgggctgatctccgttttcaaagcgctgtataacgccgtgtacgccgtcatgaagctgcgccccatgcagaaaaaagtcgtcatgatcagccgccagtcgaacagccagcggccggattttgaacagctcggcgcagagattgaagcgcgtgatccaggggtgcgccttgtgtatctctgccgcgaaatgggcgatacgccgttagagctcctgcgctattgtttccatttgctgcactgcgctgcggaactttccaccgcgcatgtgtgcatcatagacggctactgcatcccggtcagcgtgctgcatcaccgtaaagagctgcgcgtggtgcaggtctggcacgcgcttggcgccattaagaagtttggcaggcaggcgctttccgtgcccggcgggcgcgataaagagcttgcggagcgcatggggatgcataagcactacgatgccgtgctctgtgcgagtcaccgtacagcaaaagcctatgaggaggcgttcggcgtttctgccgataaaatgcgcgtgaccggcgtgccgcgcgtagacgccattttgaaaatgaatcgcgcacgttgccgccgccgttttttcgcggcctacccggagctgcgcgggcagaagatcgtcctatacgctcccacgttccgcgacggcgagcaaatgcctgagattgagccgctcatcacggcggcggaaaaaatgggtatgctgctcatcgtgcggctgcacccactcgaccgcgagcgcttggagcgccgccgtgtgctgccgaaattccgcgagtgcccggagttcggcaccttcacgctgatggcagtagcagacgccgtcatcacggactattccgctatttccattgaggcgagcctcatcaaaaagccggtgtatttctacgtttacgatttagagcgctacaaggaaacgcgcggcctcaactttgacccgcttgcagagatgccgcactgcgcattcacaaaagccgagcctctgctcgactgtatcctccatacgccctacgattacgaaaagctcaccgctttcagaaaagaattcgtggagacggatgacacgaacaacacgcagcgctgtgtggaccttataatgactttccttacagaagggataaatgatagataaaatgaagtcagaacgtaattttgattcgataaaagtcagcgttatcgttcctgtatacaacgttgaagcgtatttggagcgttgccttgattccttagtgaagcaaacgctggaagaaatggagatcattgttgtcaacgatggcacaaaggataattcgcaggtgatcatagaccgttatgccgcagcatatccgcagaaggtgataagcctcatcaaagaaaacggcggcttatccgatgcgcgcaactacggtattccgtatgcgcacggtgaatacatcggctttgtggacagcgatgactatttaaacgtgactatgtaccaaaagctgtacgaccgcgccgctgaaacggattcggacattgtggtttgcggctattacggcatagacgaaaataccgaaacgcggcgctttttccagcgcggcagcactctggagttcggtgtgagcctgtacgaaaacccgaagcttctgtacacaaatgcaccgtatgcctggaataaaatttaccgccgcgccttatttgagcgcacggggatacgcttcccgaaagggaaaatttatgaggacattgcgaccatctatccgctgatgctgcatgccaaccgaatctccaaagtaaacgagccgctgtactactatattctaaagcgcgaaggcgcaatcacggcgacattctccgagaacatcctgcagatgtatgattcgctcgcaatcatgaacgaatactatattcgggaaggcgcattcgaggagtttaaagaggtgctcggcttcatcaatttgaagcacacgatcctgcgcttccgcgattttacggcatataaagataaagacctgcagtttaaagtcgtccataagggctttcagcatctggatcactattttgatgactggcgcagaaacaaggcgttttttgactttttcttctccaaaaaacggctgatgggcgctttggccaagcacgagttcacgtggtatctttacagcatgatgccgaattccgtgctgcgccttttgggcaaagcggcaaaaacgatgcgcaaggctttgacggttttctcaaagcgcagttatttgaataaatactactacgtgcgcacgtgtaaaaagaagccgctttgcgacaagcaggtgctttttgaatccttccacggtacgaacctaaacgattcgccgttcgcaatgatgcgcgagctggcaaaggacccgacgtttaccatctattacacgtcgaaaaaagagctgatgggcgagcaccggaagatattagacgcgtatgggctgaaccgtgtgcagcttatcccgctcggctcgagaaaataccagaagattttggcaacgagccgataccttgtaaataacgtgagcttcccaacgtattttatccgccgtgaagggcaggtctatttgaatacatggcacggaacgccgctgaagaccctcggcaaaaaaatggcgatgggcattcaggatatgagcaacatgcagcgcaatttcctgcacagcagctatcttctgcacccgaaccgctatacgatggatcacatgatggaagattacaacctgaaccacctctatacgggaaaggtgatcctgagcgggtacccgcgcaacgcgatattctgggataaagacgcagcagcggcggtgcggaagcaatacggaatggacggcaaggaaacctttgcctacatgccgacttggcgcggcgcgatgagctccggcgcaaacaaaggcgggtacgaagcggaagtgcgcgacctgctgacaaagttcgacagcgcgctgacggataagcagatcatgtacgtgaacctgcatccgcttgtaaaagacaaagtgccgatcgaaggctataagcacattgtaaaattcccggatgacgtggacagttacagttttttgaatgctgtggacgtgctgattacggactattccagcgttttcttcgatttttccatcacgcgcaagccaatcgtgctctttatgtacgactatgatgcgtacatggcagagcgtggcatgtatatggatgtgcgcgacctcccgttccgcaaaatttataccatgaacgaaatgctcgcatacctgcacgaaaacgataaacaggcagacgtgaacagtgcggcgtatgacgcgtattataagatgtttacaaattacgatgcgccggataatatccggaacctgaacgatatgctgttctacggaaaagcgccgaagtttgaagtgatcgattatgccgaaaacaaaaagcagccgcgaaatgtttatcttgtcggaaagaacgaccataagggttgggcaaaagagctggaacagcagctctgttccatggaagcgcccgtagcggttttcctgcgcagggatttcaacgagctcaccctcaaggagctgaccgataaatataacgattggctggattacaccgtgatcgatacgcagatgttcctttctttgccggaaaacatcaagctgtttttcagcagagagcgtaatacgtataattgcgatgctgttttcgcgcgggaagtattccgtattttgccgcatctgaatattcaaagtgtaacggcaggcgatgactcttacagaaaccggagcattgagcaagctgtaaaaaacgaaaggaaaggctaaaacatgaaacgagtattgacctacggaacgtttgacctgctgcattacggccacatcaaccttttaaagcgcgcaaaggcactgggcgattatcttatcgtggcgctttccacggatgagttcaacgccggcaagggcaaaaaagcgtttcacgattatgaaacgcgcaaaatgatgctcgaagccattcgctacgttgacctcgtcattccggagaaaagctgggatcagaagatcagcgacgtgaaggactaccatgtggacgtagtcgttatgggtagtgactgggaaaacagcgatcgctttgattacctcaaggattactgcgagctcgtcttcctgccgcgcacgccgggcatctccaccacgaagatcaagcacgacctcggccttgtaaacgaaaacgaaaatgccgaagcgctcatgaaccactgattatacgctttcgcgaaaagttatttataaaaatagcagatataaaacacgctcccgctgcagatactttaaagaagtaagcaggggagcgtgaatttttttgagaaaagttggatcaaaaggtttttatcaccgttacagttcgctctgtgttacgccgtcaaatcgacatactcgcctttgacgaagcccaaaagctgatccgggtttacgatgagctgcacgccgcgcataccgccgctgacggcgattgcatcaaacagcatggcggtctcgtcgatatacgtcgggaattccttcttcatgcccacgggcgagcagccgccgcggatatagccggtcgtcggtagcaagtctttcacgtgcagaagctccacggatttatttttgctggctctggcggcttttttgaggtctaattcctccgctacggggatgcaaaacacgacaaacccggtcttatcgccgcgcgcaacgagtgttttgaacaccgtctcatacggcatgcccacggcgtctgccgcgtgtatgcccgcgagatcggtctcctcaaattcatatgtgcgcacctcatagggaatcttcgcgccgtccagcatgcgcatggcgttcgtcttttttacgccggagctcatgcttcaccgagctccttcaggatcatgtcggccgcctgctttgcgcacttgcggtagccttcctcggtcaggtgcagcatatcggggcacttataatagtgctcgccttccttgcacagcgcgtaaaggtcgttcaccgggatgttttcctctgccatcagctttttggcggcgttgttatacagctctacccactcgttattgtagttgatgctgtccgcctgcgtgccggtgttgtctgccgccatgccgggctccaaaatcggcgtggtggtcgcgaagatgatcttcgcgccgttttctctgcacagcttgatgatgcgctttaagaagtgcacatattcctcaacggggtgcatggcctccgtcatcggagcctcaatgttcatatcccagtagccgttgttccagtgtaccacgtcaaaatggccgtgatgcttgaacatctggttcgcctgccacagcgtgtacgcagcgaagcggccgttgtcctcggcatcgtaaacaacctcacacttgccgtctaacgcttcttttacataatcgtcatagcccatgcgaatggaatcgccgagcaaaagcacttttttcattctgaaaacctcttttcgggtagatttgccaatagaattatactgccaaaaccgtgaaaattcaagatgctttcggcagtatacaaaagggcgctgcgtttctctgaaaagcgtggtatactctgcttgtttttctgaaaagatcgaaaaaggagctgtgaaaaatgggcagatacgatgaaattttggcgcgttttatggcatttgccgagcgtgagccgcgcattttgatgggcgtgcaggtcggttccggcgtgcggaaagaccgtccggcggacgcctacacgacgcagtgggtgcagaaagcatttgaaaattaaacccgccaaacacagcaaaacggcaccgatgaaatttgtcaccggtgccgttcattttaggttaggggaaaagctgacttacttcttttcctgaatgtacttgtcgattgcagctgcggcggtcttgcctgcgcccatggcgaggataaccgttgcggcacccgttacggcgtcgccgcctgcgtacacaccctcgatggaggtgaggccgtgttcgtccgcgatgatctggccgcgcttctgggtctcaagacccggggtggtcgctttcagcagcgggttcggggaagtaccgagggacatgataacgcaatccatcggaatatcgaattcgctgccctcaatgacgatcgggctgcgtctgccggaagcatccggctcgccaagctccatttttacgcagcgaataccggcgacccagccgtagttcgggtcacgcgggtcggtgacgtccgtcggcaaaatctctaccgggttcgtcagcgtgtggaagatgatgccctcttcctctgcgtgctccacttcttccttacgtgccggcagttctgccatgccgcggcggtagatgatgtacacgttctccgcgccgagacgctttgcggttctcgcggcgtccatggccacgttaccgccgccgacgaccgccacgtttttcgcgtgctggatcggcgtagtggaatcatcgcggtaagccttcatcaggttgctgcgggtgaggaattcgtttgcggagtacacacccttcaggttctcgcccgggatgttcataaagcggggaagacctgcacccgtgccgacaaacacggcctcgtagccgtactcgtccttcagctcttcaatcgtcaggatacgaccgatgaccatattggtctccaccttgacgccgagcgccttgaggttatcgacttccttctgcacgatggacttcggcagacggaactccgggatgccgtacacgagtacgccgcctgcaaggtgcagcgcctcgtaaatcgtcacgtcgtagcccagctttgcgaggtcgcccgcgcaggtaagacccgcagggccggaaccgataacggcaaccttgtggccgttcttcggcgcggtgatggtggcaacggtagcgtgtgcgttgtgccagtcggcaacaaaacgctccagacggccgataccgaccggttcgcccttaatgccgcgcacgcacttgccttcgcactgcgtctcctgcgggcagacacggccgcagacagccggcagggaagaggactgcgcaataacctgatacgcgccctcaaagtcgtgctcggcgacctttttgatgaattccggaatatgaatattgaccgggcagccggaaacgcacggcatgttcttacaattcaggcagcgctgtgcttcgtccagcgccatttcttcggtatagcccagtgtgacctctttaaagttcttgttgcgaacgttcgggtcctgcgagggcatggggttctttgtcattctcatgttaggcatgatcactcaacctccttcttgaacaggttgcaggcttcctcataagcgtggcgctcgaaagaagtgtagctgcgggagcggctcatcgcctcgtcaaaatcgacctcgtggccgtcaaaatccgggccgtctacgcaggcaaacttcgttttgccgccaacggtcaggcggcagccgccgcacatgcccgtgccgtctatcatgatcggattcatggaaacaacggtcttctggtcgtattcctttgtggtgaggcagacgaacttcatcatgatcagcgggccgatggcgatgacctcgtcaaaacgctcgccgttttcaagcagcgtcttcagcggggcggtgacattgcccttttcgccgtaggagccgtcgtccgtcatcagcgtgaagtggtcggagcaagccttgaattcgtcttccagaatcacgagatcctgattgcggaagccgataatagaggtgacttccgcacccatggcgtgcagctcttcggcaatgggcagtgcgatggcgcagcctacgccgccgccgataacgcagaccttcttaagaccgtctacatgcgttggtacgccaagcgggcctacgaagtcgtgcagacattcaccttcgtttaagtggttgagcttttcggtcgttgcgccgacaatctgaaaaatgattgtaacggtgcccttttcgcggtcatagccggcaacggtcagcgggatgcgctcgccgttttcgtctacgcgcagaatgataaactggccgggctttgcttttttcgcaatgagcggcgcctcgatctccatccgcgtcaccgtggggttcagcggctgttttttaacgatcttatacatacttcaaaacctttcccttcaggcatgtgcgcagtttgtgcgattctgcctaagttttgtctgtgtcggatgccggttttgcaattttttcctttaaaacctgcaaacgatactattataacagagaaatatcaaaattacaacgggaaaagacaggaaatccctgccgtgcggcgatttccgaagaaataccgggcggcagggatagaatgtccttttaccggacagatgcccggggtgcgttatagattgtctttatagacttagaagtcaacttccgtgtcgtagtagcagcacttaagcagcttttccatctcttcctggctgggctgacgcgggttggaaccggtgcaggcatcggcgatagcgttctttgcaatctccggcagtctctcaaggaagacgttctccggcacaaagccgttctcggtcgggaagctgtccgggccgtagtgcttgatgcagtgcggaatgttcagctcgtcgttcatgctgcgcaggtactggatgagcagctgtaccttctcgtcgtcgttgttgccaccgaggtgcatgtagtcggcgatgacgccgtaacgcttctttgcagtctcatcctttgcgttgaacgcgatgaccttcggcaggtacatagcgtttgcagcgccgtggatgatgtgtgcgccgtaatcggcaaacgcagcgccggtcttgtgtgccatggagtgtacgatgccgagcagagcgttggagaacgccataccggccagacactgtgcgttgtgcatgttgtcgcgggcggtcatatcgccgttataggacgggataagatccttcatgatcatctcgattgcgtggatggcgagcgggtcggtgaaatcgcagtttgcggtggaaacatacgcttcaatcgcatgggtcatagcatccataccggtgtgcgcaacgagtttcttcggcatcgtctctgcaaggtccgggtcaacgatggcgacatccggggtaatctcgaagtcagcgatcgggtacttgatgcccttctgataatcggtgatgatggagaacgcggtcacttccgtcgcggtgccggaagtagaggaaatggcgcagaagtgtgccttctggcgcagcttcggcaggccgaagaccttgcacatatcctcaaacgtaacgtccgggtattcgtatttgatccacatagcttttgcggcatcgatcggagagccgccgcccatcgcgatgatccaatccggctggaactcgatcatcttctgcgcacccttcataacggtctcaacagacgggtcggactcaatgccttcaatcagctcgacctccatgccggcttccttcagatagccgactgcacggtccaaaaagccgaaacgcttcatggagccgccgcctacacaaacaacagccttcttgccttcaaaatgcttcagttcttccaaagcacccttaccatgatacaaatcgcggggaagtgtaaatcttgccataagtctatcgccctttctatgtgaagcaatttattgcaaagctcggtggtttgcaccacctaacttctttttacgactgtattgtatatcaaaatttttgatttgttaagtgctaaatttgcatattgatatttctatatcgatatacatgtgctaaaaatgaacggagtgttagggaactattttgttgtgtttcacagagagtttgataataaaatgtcacgcagaagaaatacacattctgcgcgacatttttaatttgcttatgaaatttgtttcacggtgcgtatactatatataaatacggtattgtcctcgcgcggattcggcacgagttccgctgtgaagattgcctgcggttccgcctcgttctcgtcgcggatgagcgctgccgttacggtgtacacatctccgcttttcacacagtcttgtatgtccacggaaaagccgccgccgcttataggccgcgcataggtgtcgctgtccgcatcgtacgaaatctcacccgaaagcgagtcgggaatatccggcaggtcttcatttgcggcgctttcgaatagtccgctcacaatttcttccatcaccccgcgagagagtaccagcgcgctgccggttgtctctgcgctgtaaaacgtcatgccgcagttgtccaccgcaaaggccgcggtctgccaaaagtaaacgggatcattcgcgtcaaacgccatgccgttcatctgcgccagaatgtgtgcttccaaaagcggcgccatcgcttcaagctccgcggtgatctctgcgttttcgcttacctcgttgtttttcggtgcgggagatgcggtggattttaccgtcggctcggcggtaggcgatgccgttgcggtcgcttcgggggaaggcgtcaacgtttccgctacgtgctctgaagccgccgcgctgctcacactttgtgtgttttccgctgtgccgcaggcggccgcagagagcgcaagcgccgcagaaagcacggaagctaaaatcgtttttctaagctgcatgtggttttcactcctttcagccgttttttaagtataagacacttttagcacaaaactgtgaacgccgtttgaatttcgtgcattgtgcaaaaatttttcatttccgtgaacatttcggaaatacgctttacaaatcggggtctgtcatgtaaaataagtataagtataaatctgtgcatttgcaaattgaaaaaatttgcgggtgtgcgtcacaggatatggaatactaaagaatcgaggatgaacgtatgaatttgaagtataaaagagttcttttaaagctcagcggcgaatcgctttccggcaagatcggtcacggcatcgattttgacaccgttgtcaagatctgcgagcccatcaagaagatcgtggacatgggctgcgaggtcgccatcgttgtgggcggcggcaatttctggcgcggcagaagcagcggcagcatggaccgtacccgtgcagaccacatgggcatgctggctacggtcattaatgcactcggcgtggcggacggcctcgagcaggtcggccttgacgtgcgcgtgcagacagccatcgccatgcaggaggtcgcagagccgtacatccgcaaccgtgcggtgcgtcaccttgaaaaaggccgcgttgtcgtgtttggctgcggcacgggtaacccgtacttctccaccgataccggcgcagcgctgcgcggtgcagaaatcgacgccgaagtcatcttaaaggcgaccatggtcgacggcgtttacgacagtgacccgaagaagaacccgaacgcaaagaagtacgatcatctcacgtatatggaaatcctcaatcagaacctgcaagtcatggatatgacggccgcttccttctgtaacgaccgcggcatcccgttccttgtgttcagcattgaggacccggagaacatcgtccgcgccgtctgcggcgaaaacgtcggcacggtcatcacgaaggactaaagctttttaggggagaagccttgtgcgccctgataaagagcacacaaaacgtataatgaaataacagataggagaatatacttatgaaggaagtattggcaaaagcagaaagcaaaatgggcaaaaccatcgcgagactcgaaagcgactacgccgccatccgcgcaggccgcgcaaacccggctgtgctcgataaggtcatggtcgattactacggtgcacccacaccggtcaaccagcttgcagccgtttccgttgcggaggcacgcgtgctgaccattcagccgtgggacggttccgtctgccgcgccattgagcgcgccatccagacctcggacatcggcatcaacccgcagtccgacggcaagaccatccgcctcattttcccgccgctcaccgaagagaagcgtaaggatatcgtgaaggacgtcagtcacatggcagaagaagcgaaaatcgccctgcgttccatccgccgcgacgctatggaaaagctgaaggcgatgaagaaagacggcgaactgaccgaggacgacctgaagcaggcggaaaagaaaacgcaggagctgacggataagtacgtaaagcaggcagacgaacgctctgccgcaaagcagaaggaagttctcaccctgtaagcaaaaggaaggctccgaaatggcatttggaagtaaagaaaacaaaacgcccgtgcaggtgccggcacatatcggcatcatcatggacggcaacggtcgttgggctaaaaagcgtggtctgccgcgtacggcgggccacacggcgggcgcgcagaatttccgcaccatcacgcggtatgcatcgtctatcggcgtaaaatatctcacactttacgcgttttccacggaaaactggagccgccccgcagaggaagtctctgcgctgatgaagcttttccaccagtacctcgaggaagcgctgcgcgacttcatgaatgagaatatccgggtgcgctttatcggtgacatttccgcttttgcgcccgacttacaggcgctcattcatcgcgtggaggaagcgagcagcgtgaagaccggcatggtgctgaacctcgccatgaactacggcggccgcgcagagattacccgcgcggcacgcattttggcagagcgcgtcaaaaacggcgagctttcgcccgaggacatcacggaggaaacgctttccggcgctatgtacaccgccggccagcctgacccggatctcatcatccgtccaagcggcgaagagcgcatctcaaacttccttttgtggcagagcgcctataccgaatttgaatattttgatattctctggccggatttcaagccgaagcacttggacgaagccattgaaaagttcaacagcagacaacgccgtttcggcggtgtatgattttttgcagtgcgggcggcacatgccgccctgtaccgcgtttctattacattccgaacggtgaaaggaaaccataggtatatgaaggacagagttttatccggtgtcacgctggtcgcatttttcatggcaatcgtcgtgttcaaccgctcttttccgctggcactcaatattgccattgcgtttatctccgcgctcgctgtttttgaagtcatcaaggcgctgggactttccgaccgctggtatatcacggttcccggcatgacagctgccgtgctggtgcagttctgtgaatttcagcaggcaaatatctttatttattccgcgttcacggcgtgcattttctgcgcgctgctgcgccaccaccgcgagatcacttttaaagaaatggccgttgtgtacagcatggtcgttttgatcccactcgcgctgcagactatcgttctggtgcgcacgttgagcgaccagcacggcatgttctacgcgctcgtgtgcgtattctccgcatggattccggacgcaggcgcgtttttcgccggcaagctcttcggtaagcacaagctgtgcccggagatcagccccaaaaagactgtggagggtctcatcggcggcgtgttgtccagcgtcatcattttgcagctcgtgggtctcattttcacctacggtatttacggcggcgaacgtcaggcaaactggctctcgctttttatcatcggttttttcggcgcgtttgtgtccgtgctcggcgacctcagcttttcgcttattaaaagaagctgccacatcaaagatttcggcagcgtcattccgggccacggcggcattttggaccgtttcgacagcgtgattttcaccgcaccgtttgtctacatggtaacgatgctgctgccgatcgtgtcgtaagaaaggatgggtctgcatgaaaaagttagctttgctcggctctaccgggtccatcggcacacaggcgctcgacgttgtgcgctgtatacaaaaggaaggggagcacgccgttaaagtggaggcgctcgctgcccattccaatattcggcttctggaagagcagatccgggaatttaaaccgcaagcagttgcggtttttgatttggaagctgcttctaagcttcgcgccgccgttcgcgacctcaatgtgaaggtgtacagcggcatggagggcctttgtgccctgacggagctggaaagcgttgatatcgttttaaactccgtcgtgggcatggtgggtctcaagccgaccttaacagcactcgaagccaaaaagcagatggcgctcgcgaataaggaaacgctcgtcgcaggcggttcactcgtcatgaagaccgccaaggaaaacggcatcgaaattctgcccgtagacagcgagcattctgctattttccagtgtttgcagggtatgtacaaaaagtgcgacttaaataaaatcatcttaacggcgtccggcggtccgttcttcggcaaaaaagccggggagcttcagcatatccaccccgcagacgccttaaagcacccgaactgggacatgggcgcgaaggttaccatagacagctccacgctcatgaataaggggcttgaattcatcgaagccaagtggcttttcgatatggagccggacgacatcgacgtcgttgtgcaccgcgaaagcatcgtgcactcgctcattgagtataaggaccactccgtcatcgcgcagctcggcgtgccggatatgcgcatccccatccagtatgcgctcacctacccgcgccgcttcccgtcgcccgtaaagcagttgaatttggctgattggcagaagctgacgttctatgcgccggacgaagaaaccttcacgtgctttggcgcgtgtaagcgtgccattcgccgcggcggtacactgcccgcggcggtcaacggtgcaaacgaagccgctgttgcgctgtttttaaaagaaaagatcggctggcaggacatcggcgaactcgtgtgccatgtagccgatacatttgaaaccgcgcccgttacaagcgtggaggatgttttggaggccgaccgcaaagcgcgcgcctatgtgctggagcgctgcggggagagcgcaagatgagcacggtggtgcagggcatcctgctcgccgttatcggcgtattgctcttcgggctcatcattttcatccacgagttcggccactttttcacagcgaagttgagccacgtgtgtgtcaacgaattctccatcggcatggggccaaagcttttctcgttcacccgcggcgaaacacagtattccctgcggcttttgcctatcggcggctactgcgccatggagggtgaggacgaaaaaagcgacgacccccgcgcgtttggcaaccgtcctgtttggcagcgcatgatcgtggttgcggcgggcggcatcatgaatatcctgctcgccgttttgctgatgatggtcatctgcgggcaggaagaccgctacgccaccatgcggattgccggttttgcggaaaattccgcgtttgaagccgccggcgtggaggtgggcgacgtcatcacctccattgacggctacaccgtccgcaccgggcaggatctttcctttgctttaagtatggcggcgcttgattccacagacggcaccgctgcgctcgaccttaccgtaaagcgcggcgaagagaccgtcacctttaacgatatgaccatcaacacaacatctgcggacggcaagcagtaccgcgctgtgctggatttttacgtgttgggcgaagaaaaaacgccgtggacgctcatcaaaaacgcgtttgcggatacgtattccaccgtgcgtatgatctttaacagcctcatcggcatggtgacgggccgcttcggctttaaagagctcgcaggtccggtcggcacggcgcaggcagtcacgcaggccgcaagcgcggggctcaagcagagcttcggcgcggcggtcaacaacatcgtgtacatcatgcttgtgatctccgtgaacctcggcatcgtgaatttactgccgctgccggcgctcgacggcggacggctcgtgttcctcatcatcgaagcgatcttccgcaggccggttccggcaaagtacgaacgatgggtgcacgcaggcggctttgcactgctcatctgcctgatgctcgccgtcacgttccaggacatcatgcgcatcgcaacaggcggataagggaaaggatgatacaatgaaacgcatttcaaaacaggtcatggcgggcaatgtgaaaatcggcggcggcgcgcccgtcaccgtgcagtccatgctgaacgtgccctccaccgatatagaaggcagcgtgcggcaggcggtcgcactggaaaaagccggctgccagattctccgcgccgccatccccgatatggatgccgtgcggctgatccccgctatcaaagagaaaatttccattccgctcgtggcggatattcatttcgattataagcttgcgcttgaggctgcagcggcgggcgtggataaaatccgcatcaatcccggcaacatcggcggcgatgaccgcgtaaaagccgtcgcgaccgtgtgccgcgaaaagaaaattccgatccgcatcggcgtcaattccggttcggtcgaaaagagtatcctcgcaaagtacggcgcgcccacagcggaagcgctgtgcgaaagcgcactttaccacgcgtctttactcgaaaagttcgatttcacggacatcgtcatctccctgaaatcctcctcggtcgatacgaatatcaaggcgtatgaaaggattgcggagcgctgcgattacccgctgcacctcggcgtgacggaaaccggcacgctgcgcatggggatcgtcaagtccgccatcggcatcggcagccttttgcagcgcggcatcggcgatacgctgcgcgtttccctgacggccgaccccgcagaggagattcgcaccggccgcgatattttaagcgcgctcggtctgcgcggcggcgtaaagcttgtttcctgccccacctgcggcagaacacgtatcgacctcatcggccttgccaataaggtcgaaaaggcactcgaatacgtggataaggatatcaccgttgccgtcatgggctgtgttgtcaacggccccggcgaagcgcgcgaggccgacctcggcgtcaccggcggcaagggagagggtctcattttcaaaaaaggtcagatcatccgcaaggtgccggaagctgagcttctggacgccctgatggaagagatcgacaagctttaatttgcaataaaacaggctgtgccgggcggtacggcctttttgcatcatctcacaccataaaaacacagaccattctacataggagagatgcacttgaaaacattaggcgatctgctgaaaagcgccggctatacgccgaaagacggcgtcgctgccggtcagatcgaaaaaatagagatacacagggaaaaccgtttggtgcgcctgaaaacgaagtttgaagccttcgtgccgtacagcgacctgcgcgaggtaaacggtatgctgcacgagcgcattctgcccgatatgcgcgtggagcttgcccccgcattccccgctcaggcgtggcaggaaagctgcgttacctccgttttggagtgcgtgcgcgagcttgacgcaagcttaaacggcacatttaaagacgcagactgcaccataaacgaaaatacccttacaatagagctgctgcacggcggactcaatctgctcgaaaagcgccataccgaccgcgccatcagcgaaacggtgcaggagtggttcaacgtgcccgttacggtgacgttcacgggcaaaacagaactgcaaaacggcgacgaatccgtcatcgagcgattgcacgtcgaggaagaaaagcgtgcgcgcgccgccgccatcgaagaaatggatcgttacgaagccgccatgaaagagatagccgcgaagcgccgcgtcagcgtgcgcgagggcaaatcgctcatgccgcagatcgttctggagaccgcgcgccccattctcggcaacctgccgaaaaaggagccggtaccgatttccgaagcgaccatcgaagccggacgtatcaccgtttggggcgaggtgttcgacatcgaatcccgcgaaacgcgtgacggctcccgcaaaatttattccatcgacattaccgattacacaaattccatcacgctgaagcttatccagcaggcgaacgactgctcaaagattgatgccatcaaaaagggtacggcgctgctcgtgacgggctccgtggagtacgataaatacgaccgcgaaaacgttatgcgcccgaacgccattgcccgcgcggaaatggtggaggtcgtcgataccgccaaagaaaagcgcgtagagctgcacctgcatacgaacatgtccgccatggacggcatgacccccgcaggcgagcttatcgaccgcgcctataaatgggggcaaaaggccctcgccatcaccgatcacggcgtcgcgcaggcgtttccggatgccatgaacgcatggctcaagatcaagaagggcggcggcgaattcaaggtcatctacggcgtggaaagctactttgtaaacgacctcgtgcccgccgtcaccggcgaaacggataagccgctccatacggactacatctgctttgacctcgagaccaccggcctttcttcgagcaaagaacgcatcacggagatcggcgcggtacgcgtgcataacggcgaaatcaccgaatctttcaatacattcgtcgaccccgaaaagcccattcccgcaaagattacggaactcaccggtatcacggatgaaatggtcgcgggcgcaccgaaagaggaagaagccgtgcgcaaattctttgagttctgcggcgaagacgtgattcttgtcgcgcacaacgcaaattttgatacctcgttcctgcgcgccgtgtgcagccgccacgacatgacgttcccgtatgtgtatatcgatacggtcgccatgtgtcgctccatgctgacggacatcaaaaactgcaagctcgatacggtcgcgaagtatttaaagctaaagccctttaatcaccatcgcgcgtgcgacgatgccgccgtgctcggcgagatttttatcaacctcatccagcgcctcgtcgatgatttcaagctgacggatgtcaagcagatcaacaccgcactcgcgggcggcgacccgaaaaagctgccgacctaccaccagatcattctcgttaagaacttggtgggtttaaagaatctctataagctcatctcgtttggccacctaaattacttctataagcgtccccgcacgccgaaaagcgttttgaaccggtaccgcgagggcctcatcatcggctctgcgtgcgaagcgggcgagctgttccgcgccattacgcgcggcgagccgtgggaaaaattgctcgagattgcttcctactacgattacctcgaaatccagccgcttggcaataacatgttcatggtgcgcaacggctcgtgcgatatcgagcagttaaaagagtacaaccgcaccatcgtaaagctcggcgaaaagctgaaaaagcccgttgtcgcaacgggagacgtgcacttcaaagacccgaaagacgccgcaggccgcgccattttgatggcaggtcagggcttcacggatgccgatgagcaggcgccgctctacatgcgcaccacggacgaaatgctgaaagaattcgactacctcggcaaagataaagcgtatgaggttgtcgtcaccaatacgaacaagatcgccgatatgatcgaggaaatccgccccatcccggagggcgttttcccaccgtttatcgacggcgcagaggagcagctgaactccattacgtgggcgcgcaccaaggaaaagtacggtgacccgctgccggagatcgtcgaaaagcgattaaagcgcgagctcggctccatcaacaagcacggcttctccgttttgtacatgacggcgcaaaagcttgtggcagacagcgaagcacacggctacctcgtcggctcgcgtggctccgtcggctcgtcgttcgtcgcgaccatgtccggcatctcggaggtcaaccccttggagccgcactacatttgccccaagtgcaaatacagcgagttcatcacggacggcagctacctttccggctttgatctgccgccgaaaaagtgcccgcgctgcggcgaagatctcgaccgcgacggccacaccatcccgtttgagacattcctcggctttgacggcgacaaaacgccggatatcgacctcaacttctccggcgaataccaaagcggtgcgcaccgctatacggagacgctgttcggccgcgaaaacgtcttcaaggccggcaccatcgcaaccgtcgcggataaaaccgcgttcggctacgtgaaaaagtatgccgaagaacgttcccgcgtgctttcccgcgcggaggaaaaacgcctttccatttcctgcacgggcatcaagcgcaccacgggccagcacccgggcggcatggtcgtcgtgccaaagggcaaagaggtctacgatttctgcccggtgcagcaccccgcaaacgaccagaattccgataacatcaccacgcacttcgacttccattccattcacgataccatttgtaagctggacgagctcggccacgatgtgccgaccatctatcgctatctcgaagattacacgggtatccccgtcatgaaggtctccatgagcgacccggcggtcatgtcgctgtttacgtccacggaagcgctcggcgtcacgccggaggacatcggctcgttgacgggcacgttctctctgccggagtgcggcacgccgttcgtgcgccaaatgctcatcgatgcccagccgaagacattctccgaccttctgcaggtttcgggtctgtcccacggcacggatgtttggatcggcaacgcgcaggacctcatcaaagacggcacctgcaccatcgccaccgtcatcggtacgcgagacagcatcatgacctacctgctcttaaagggccttgagccgaaaatggcgtttaagattatggaaatcacccgtaagggcaacgcgaaaaagctcttcacgcaggagcacatcgccgccatgaaggagcacaacgtgccggattggtacatcgagtcctgctataagattaagtacatgttcccgaaagcgcacgctgccgcctacatgatcgcgacgctgcgcctcggctggtacaaggtgcattatcctgtggaatactacgcggcgtacttcaccgtgcgcagtgaagatttcgacggcgccaccgccgtgcaggggcgtgccgccgtgcagcgccgtatgcgcgagctggagcagaagcaaaaggaacaccagtccactgtcaaggaggacgcggcgtattccacattccagattatcaacgaaatgctgtgccgtggcatcgagcttttgccggtcgacctgtataagtccgacgcgaaaaagttccttgtcgaagacggcaaaatccgtctgccgttctcgtccctgcccggtgtgggcgaggcggcggcgcacagcttgtatgaagcgtgcacgggcggcgagacgttcatctccatcgacgaagtgcagtcccgcgccaaggtctccagcgctgttatcgacgttttaaaaagcgccggtgcgctgcagggcctgccggacagcagccagacatcactgttttaatgtcattaggcggacgcaagaagttgcttccgcctttctgcatatctatgcgtatatacatgtatacacaaaacgggaaaagtcttgacaagcgcacacctgcatgatattattgtagcacgtcattacattaaagcaaaaggacggtcgttatgaagaagttcaacaagattacgccggagggcaccaaggatattctgtttgaagagtgcctttcgcagcgtaccgtgagcgagcggctcacgcatatattcaaaatgcgcggctataatgaggtcatcacgcccggcatggaatactacgacgtgttcgatgccccaaacgccgccattcctcagtatgagatgtataaatccacggataacaaaggcaggctcatcgtgttccgccccgatttaacgctgcccatcgcgcgccttaccgcaacgcggttgcaggcgatggaaaagcccattcggctttactataaccagccgatctatcgcaaccgcaaggatctttccggccgcagcgacgaaacaacgcaggcgggcatcgagcttttgggtgcatcggggctgaaagcggatattgaggtcatcgccgccgctgttgaggcgctttccgcgtgcacggaaaacttccgcttggagatcggcagcgcaaagttcttcggtgcgctcgccgatgagctgcccgtctccgccgataaaaaagaggatatccgccagacgattgaatcgaaaaactacgccgccctcggcgatatgctcgacgcactcccgaaatccgtgtataccgaagccatcaaaaagctgccgcgcctgttcggcggggcagaggtcttcacagaagccgagcagttctgcaaaggccaccccgtgctttccgaaacgctcgattatatgcgcacgctatatactgcgctgtcgtcgctcggcctcgatgaccgcctgatggtcgattttggccttgtgcagcgcaatgattactacaccggtgttgtcttcagcgcttatgtggaaaactacggtgacgccgttttaatgggcggccgctacgatacgcttttaaagcaattcgatgcccccctgcccgctatcggctttgccgcaaacgtcgatgcgctggcttctgttttgctcgacgacggccggattgaaagcgtgcccacgccggacgtgctcgtccacgcggaaagcggcgcggagatcaaagcacagatgaaaattcgcgagctgacagcaaacggcaaaatctgcgaaagctccgtgttcgatacggcagacgaggccgagcgctacgcaaagcgccgcggcatcccggaagtcatcgttcttagaggggaggaaaacgcatgaagccgctcagaattgccctcacaaaagggcgccttgaaaaagacaccgtgaatcttttggagcagatcggccttgattgcacgcaagtgcgcgaaaaaggcagaagactgattcttcccgttggaaacggcgagatcgaagtcgttttagccaaagctgccgatgtcatcacttacgtcgaaaacggcgtgtgcgacctcggtgtcgtcggcaaagataccatcatggaaaacggcagtcatttttacgaaattttagaccttggcttcggccgctgccgctttgcgctcgcctgccgcaagggtacggatttcttcggcggctacaaagcgaagaccgtcgcgtccaaatacccgaacgttgcacggcagttctttgaaagccgcgccatggacgtgcgcatcatcaaaatcgagggctccgtagagctcgccccgctgctcggccttgcagacggcatcgtcgatatcgttgagaccggcaccaccttaaaagaaaacggtctggaggtcacggagaccatcgccggtatctcggcgcgtctcatcgcaaacaccgccagtcttaaaatgagaaagcaggagattgaagcgcttgctgcccgcatggaagcgcagattgaaaagaacagggaggagaaatccgtatgatccgtattgccaaaggcgatagagcctactgtgaagcgtttattcaaagccttaaatcccgcgtcagcgaaaacgaccgcagcgtagaggataaagtggccgaaattttgaaggatgtgcgcgataacggcgacgaagctgtgcgccgctatacgatgaagttcgacggctgggcgccggagaaagcggagatcacaaaagaggagatcgatgcgctcaccgcagactgcgacccggcgttcatcgcttcgatggagcgcgccgcagaaaatatccgcgcgttccacgccagacaaaagcagcaaagccgcatcgatccctcgcccacgggtgttttgatgggtcagcgcgtgcgcggcctgcacagggtcggcgtgtatgtgccgggcggtacggcagcgtacccgtcctctgttttgatgaacgtcatcccggcgaaaattgccgaagtcggcgagatcgtcatggtcacgccgccgggacgtaccggcaagccggataaaaacattttggccgccgcaaaaattgccggcgtagatcgcgtgttcctcatcggcggcgcgcaggccgtcgcggcgctcgcctacggcaccgagaccgtcccgaaggttgataaagtcgtcggccccggcaacattttcgtcgccacggcaaagaaattactgtacggcaccatcgatatcgacatgattgccggtccaagcgaaattctcgtcattgcggataaaaccgcgaagccggagttcttggccgccgacctcatgagccaggcggagcacgaccgcatggcgtccgccattctcattaccccggaggaagaccttgcaaaggcgaccgccgcggagattgagcgccagatgcagacgctttcaagaaaagatattattaaagaatccatcgaaaatttcggtgcaattattgtctgcgaaaacatggcggaagccgtcgatttcgcaaacgagctcgccccggagcaccttgaagtctgctgcgaaaatccgctcgaatacatcggcaagctcgataacgccggttccgtgttcctcggaaactattctccggagccgctcggcgattacttcgcgggtccaaaccacgtgctgcctaccagcggtacggcgcgtttcttctcgccgctttccgtcgatgattttatcaaaaaatcgagctttatctactatacggaagcggagcttctgaaagctgccgacgacatcatccgcattgccgagaccgaagagctgaccgcgcacgcgaattccatcgccgtccgcaagaaaaagtgaccccggaggtagtttatgtatacgctgaatgaaaagatccgcgatttagagccgtatgaacccattgcgggcgagtataaaattcgtctggacgcaaacgaatcgttcctgtgcctgccggaatccgttatggcgtccgctttgcacgccatgatgagagtggagctcaaccgctatccggatcccaccgcaaaagacctgtgcgccgcctttgccaaaagctataaagtaaagccggcgtgcgttgcggcgggcaacggcagcgatgagctcatcaacgtcattttccagagctttctgatgaagggcgagacctacgcaacgctcacgctggatttttccatgtatgatttttacggctacgtttcggaatgccgcggcatcgaaatcaaaaaagacgaaaatttcacaatcgatattgacaaggtgatcgaaacctgcaacaatgagaacgtaaagctgctcattttcagcaacccgtgcaatccgacatccgtcggcctcacgcgcgaagccgtgcgcaaaatcatcaggggcgtttccgcgctcgtcgtgctcgacgaagcctatatggacttctggaacgaatccatgctcggcgaatttgaaaactacgataatttactcatcttgaaaacatgctccaaagccttcggtctcgccgcgctgcgcgtaggctttgccgtaggcaacgaaaagcttgtccgcgccatcaaggctgtaaagtcgccgtataacgtcaacacctgctcgcagaaaatggcggaagccgtgctgaaaaaccgcgcggaagccgatgccgccatccgcagattgctgctttcgcgagacgaattgcagcagaaattcgaccgcatggcgcagcgcttcccggaaaaactccaaacggtaaagagcgtcacgaattttgtcgttttgcgcacgccgtacgcaaaggagctctacgagcgccttttggccgaatccatcgcggtgcggtactttaaaaacatgtccgccctgcgcatcacggcaggctccacgggcgaaaacgcagtggtcacagagcacattcagcggttctttgaagaaaaagagcaagcgtaaaccgggctttaggcccttttagggggaaacgatatggaacgtgcggcaacagttgtgcgccaaacaaaagaaacgaacattgagctgaccttggggcttgacggcggcgaggttgtcgtcgataccggcgtgggctttttcgaccacatgctcacggcgcttgccgtgcacggcggcttcggccttcggttaaaagccgagggcgactggaatgtcgattgccaccacacggtggaagataccggcatcgtgctcggccgtgcgtttaagcaggcgctcggcgaccgcagcggcatcgtgcgctacggccatgccatgatccctatggatgaagcgctcggcttctgcgccgtagatgtcagcggccgcccgtaccttgtgttcgacgctgcgttcccgcaggagcgcgtcggcgattttgacacctgcatgacggaggagttcttccgcgcgcttagcgataacgccggcttcacgctgcacctgcgctgcccctacggcaaaaattctcaccatatgatcgaagcgctgttcaaagcctgcgcgcatgccctgtgcgatgccacagcagaaaacagcaccggcgcggtgctttccaccaagggcacgctttcggaataatttgaaattttaacttttttgcatacacgataatttggaatgaataaggaagggatataacatgatcattttaccggcgatcgacctcaaggacggcaaatgcgtccgcctgttccagggcgattacgccacggcggagcaggtggcggaggatcccgtcaagaccgcgcaggcttttgaggagcagggcgcgcgctgggtgcaccttgtcgatctcgatggtgcaaaggcacgccgccccgtgaacgacagcaccattttctccattcgcgataatgtctcgatgaatatagaagtcggcggcggtatccgcgatatggacaccgtggaatattatctttcgcacggcatcaatcgcatcattctgggctctgcggcgctgcacagcccggagttcgtgcgcgagaccgtgaaaaaatacggcaaaaagatcgccgtcggcattgatgcgttaaagggcaaggtggcggcagagggctggacggctcaaagcgaagtggattacctcgaaatggcaaagcgcatggaagacatcggcgtgcgctacctcatcgtgaccgatatttataaggacggcaccatgaacggcccgaacctcgtcatgctcgataaggtcaaccgcgccgtcagctgcaacatcatcgcaagcggcggtgtcagcaacttaaaggacatcgtagacctcaacgccctcggcgtgtatggtgcgattgcgggcaaatccatttatacgaaagcgctggacttaacggcggccatcaccgccagccagcgcctttccggcaaatcgttcaagtgcagcgaagaagtggaagaccatcttgagcgctactttaaaaaatcggagctcatcccgtgcatcgtgcaggaggcctccacaaacgaagtgctcatgctggcatacatgaaccgcgaatccatggcgaaaacgctggagacgggctacacgtggttttacagccgcagccgccaaacgctgtggaacaagggcgcaacgagcggccacacgcagaaggtcatcagcatgtatgccgactgcgacgacgatacactgctcgtaaaggtcgtgcagacgggcgcggcgtgccacaccggcagccacagctgcttctacaaagagattgcaagaaactgacggagggaacactatggacattttgcagcagctttatgataccgttttggagcgcaaaggggagaagcaggaggggtcttacacctgctacctgtttgaacagggactggataaaatcctcaaaaagtgcggcgaagagtgcagcgaagtcatcatcgccgcgaaaaacggcaaaaaagaggacaccgtgggcgaaatcagcgacctgctctatcacctcaccgtcatgatggtgaacgagaacatcccgcttgacgatgtgcgcgcggagcttaaccgtcgtcacggcaaaacgggtaacctcaaaactttccacaaggtggaccacaatacatgacacaaactgaaaaacacgcactttgggcgcaggaagaacaaagcgccgaaatgcacggctgggatttttcgcacatccgcgggcgtgtagtggaagccccgctgccgtgggattataagcaaaaggtgctcgattttttaaagccgcagtccgtcattttggatatgggtacgggcggcggagaattccttttgtccctgcgccacccgttttcgcagacaagcgtcacggaaagctggcagccgaattttgagctgtgcgaaaaaaagttagcgccgctcggcatcaccgtgcgcaaaaccgaagaggacaaacctctgccgtttgcggataacagctttgaccttgttttaaatcgtcacgattcttatgacgtaaacgaagtgcgccgcgtcctaaagcccggcggatattttatcacgcagcaggtaggcggcagcaacgacttgcgcctgcgcgctttgctcggcaataacaaaaccgccataccgagctttaacctcgaaaacgagctgctgcgcttcaaaaccgccggctttacggtgaatttctgcgaccaggcctatgtaaccgaccgctatttggacgtcggcgcactcgtgtggtacgcaaaggttctgccgtgggagttcggcaatttcacagtagaaagctgcctgccgcaactcgatgcgcttgacgcgctgtgtgaaaagcaaggctatatcccaagcgtgcagcaccgcttcatgctcattgtccgcaatagaaagccgaaagaataaggagaaaaccatggcagccaacattcgctttgcaaccgaaacagacattccggtcattttagagtttatccatgcgctcgccgcgtatgaaaatatggaagatcaggtcattgtaacgccggagcttttaaaagagtgggtcttccaaaagaaaaaagcagaggttttccttgtttcggaggacgaaaagcccgtgggctttgcgcttttcttccacaatttctccacgtggctcggtcgcgcgggcatttatcttgaggatcttttcgtgctgccggaatatcgcggcaagggctacggcaagctgctgttaaagcgccttgcgcggctcgctttgcagcgcggctgcggcagactggagtgggcgtgcctcgattggaacaccccaagccgcaagttctatgattccctcggtgccgtgcgcatggaggagtggacaacgtaccgcctgacgggcgatgcacttttgtcccttgcgtccaacatttcactcaaataatttcgtaaaagcaaagaggcgggctgcggctcgtctttttttgtcggttctgcggcttgcatttatgcaggaaaatgtggtatgatatttccgcaatttcacgaagaataggggaaaatgcagaatgaaaagaattctgttcattgcgaccggcggaaccatcgcttcggcgaaaacggaaaacggcctcacgccggcaattacatcggaggaacttttaaacgccgtgccgcaggtgaaaaacctgtgcgcagtggataccgtgcagccgtacagcttagacagtaccaacatgtgttggaagcagtggatccacgtggcggagatcatccgcgatagctatgcaaagtacgacggctttgtcatcgcccacggcacggatacgttgtcctacgcggcggccacgctctcgtatctcatccagaaaaacgaaaagcccgttgttttaacgggtgcgcagaaatccatcgaggtgccggacggcgacgcgcggcgcaatttgtttgaagcgtttgtatatgccacagatgcccgtgcatgcggcacacacgtcgtttttaacgggcacgtcattgcaggcacccgcgccagaaaaacgcatacaaagagctttgacgccttttccagcattgatttcccggacatcggcgtgttctacgataaaaagctcctgtgctatattgatgagcgcccggagtgccccggcgcggtgttctacgataaattggtgccggagattctctccatccgcgtcatcccgggcatggacccgtccgtgttcgattacatcaccgcgcactgccgcggcgttgtcatcgaaagcttcggcgtcggcggcatcccgtactacggcgacaacgcgtttgaggaaaagatcgctgcgttaatggaaaacggtgtgcgcgtcgtcatcaccacgcaggttccgcacgagggcagcaacctttccgtttaccgcgtgggccatatcatcaaggaaaaataccgcgtgctcgaagcttccaacatgacaacggaagccgtcatcgccaaaatgatgtgggcactggcttattccgagacccgcgaggaatttgaaaagctcttctgcacccctgtaggcaaagaccaattataaatgatattcatctgcggcgggtgatattgcccttcggacaatgcaagtgaagcttgctatatcattacaaaacagaaggcagagcgatgatgtgctctgccttccgtttttgtccgtcatatttgttttttcgcggctaatttgtcgcgcttcttttgcagcattgcaatgagctcgtcaatcatcgaagccgggtcatccgccgtgtcgatcattgcagagaggaacggcgccacgagcgcgggatcctgaatcgttttgtcgcgcagctgtaactgggcatactcatcctctgtcatgcacggtgcaaaggtgcgcgcataattgcgaaacgtcttcacaaagccggccggggtaatcatccctttttttaaaagagagttcaccatcaggtgaatgtagctgtccttccaggtcttctgtggggaaagcgcgaccatttccgccgcggaaagcgcacgatccgtgtgccacaaaagatacatgacttcgctttcgctttttgtaagcgccgtctttttcatataaatccgtaacctcgctttagtaggaatttgcgcagggttttatggaagcattatataatataacgcccgtgcttgtcaatattttgggcaaaattcagttgaaaaattttcctatcagcacttttgcagattgttgaaaagcaaaaacaagaaaaaacctatgacaaagccgcaaagccgcgctgtgttttccgcctaatcataaaagttgcaaagcaggggaagagaagccctaaaaactcgtgcagcaccgctttaaaaggcaaattaacagccctaaacggatttttttgcaaagagaaacggatttcttctatttttcgggaaaaaagccttgacttttttgccccctgccactataattatttgtgttatttcgtgctaagtaacaaatacaaacccctgcctgatggcggatgggagggatatagatggctgaaatcagaatcaaagacaacgaatctttggagagcgcactcagacgctttaagaagcagtgcgcaagagcgggcgttattcaggaagttcgcaagagagaggcttacgaaaagccttccgttaagcgcaagaagaagtccgaagcagctcgcaagcgcaagtacaaataatcaaacgtgaagaagcgggctttttgcccgcttttttgtgtaaacgggtttttccgaacaacacaggaggcaaagaccgaagctatggcggtatttaaaccgaccggcacgctccactgcgtgacggagcttacgcccgagcttttaaaagcgctcaatgtgcacatgatcgtgctcgatgtggataataccatgtcgccgcacagctcgcagacgccgtttcccggcgtgcgggcgtgggcacaaagcgtaacggcaagcggcgtcaagctgatcgttgtttccaacaattacaaaaaacgtgtggcgccctttgccgcgcagttcaatctgccgttcgtttctttcgcgtgcaagccgtttccggtcggctacctgcgcgcaaagaaaatggccggcacgccccgcagggaatgccttgtcgtgggcgaccagatcttcaccgatatcctcggcgcaaacctttgcggcatgcggtcggttttgcttgaccccctgtcgccggatccttccgccacggtgcgcttcaagcgccgtctggaaggctttttgcgcccgcactatacgcggctcacggccggggaagaaacggtaaaaagcaaagcataaagggcacctttgggtacacattagaaaggggaattatcaatgagcaatccgatcgaacgtcttaccaattctgtcatcggcggcgatagcaaaaaagcggcgctgatcgtttccgaaacgaacctctattacctcacggcgttcccgtccacagacggcgcactgctgctcacttccgagcaggcttattatctcctcgatttccgttacaccgaggccgcacgcgccaaggcgcagaatgtggaggttgtggagttcacctcgcttaacgaaacctataagacgcttctgaaaaagcacggcatcaccgaggtgtacatggaatacgccgctctgccctacggtcatgcgaagcgttttgagcagctctccgaagagtgcggcgctaaggcgattttggatacgaccttggacgatgccatccgcaagcagcgcatcgtcaagagcgatgaggaagtgaagagaatctgtgacgcacaggccatcacagacgctacgtttgagcacatcctcccctatatcaaggaaggcgtaacggagcgcgaaattgcgctggagattgagttcttcatgcgcaaagagggtgcagacggcaatgcgttcaaccccatcgttgtcaccggcgcaaacggctcgcagtgccacggcattccgggcaacacacagatcaaaaaaggcgatctcatcaccatggataccggcgctatgctcgcgggctatcattccgatatgacccgtaccgttgcgctcggctatgtaaacgatgagcagagagccatctacaacacggttttaaaagcacagctcgccgttatcgacggcgcacgcccgggcatgcgctgctgcgatgtggataagatcgcgcgcgacatcatcgagaccccgtacccgaacacgttcggtcacggcctcggccacggcgtaggcttcgagattcacgagtggccgcgcttcaataagaccgatgagaccatctgtgagccgggcatggtcatcaccgacgagccgggcatctacatcccgggcaagtgcggcgtgcgcattgaagacatgctgctcatcacagatgacggctgccgcagcctcacacattccccgaaggagctcattatcctgtaaaatttccgaaaaaacggagaaacagaacggttttttcttgaaaaaagccactttctgttatacaatagacctaagaaaaatttggaggtattatctatatggtaaccgcaggcgatttcagaaacggcgtcacctttgaaatggacggcaacgtttactcgatcattgaattccagcacgtcaagcccggtaagggcgcggcgttcgtccgcaccaagatccgcaacgtgatttccggtgccgtgacggaaaagacgttcaacccgaacgataagtatccgaccgctttcattgagagaaaggacatggagtatctctacaatgacggcgacctgtactatttcatggacagcgagacctatgagcagctgccgatcagcccgaatgtcctcggcgacaatttccgctttgtgaaggaaaacatggtttgcaaggtgctctcctacaagggcaacgtttttggcattgagccgccgaactttgttgagcttcaggtcacagagaccgagccgggcgtgaagggcgataccgctacgaacgtcacgaagcccgctacgctggagaccggcgcagagatcaaggttccgatcttcatcaacgaaggcgaaatgatccgcgtcgataccagaaccggcgagtacatggagcgcgcataagcgtttttccttgttccatacgccgaaacacccggggcgaaagccctacattaggcagcgcgtttgcctgccggaaagataggtgcaagcatgacaaattccgagaaagcggcatacatccgcggtttgatggaaggcatggatctggacccgaatgcgaaggagacgaagctcttcaacgcgatcgttgacctgctcgatgacctctccctttccgttgaggaaatggaagacgcatacgatgagctcagcggccaggtagacgagatcgacgaagacctcggcgagctggaagaagagttctacgacatcgacgaggacgaagacgatgacgatgacgacgcatgggaagacgacgaagacgaatgctattacgaagtcacctgcccgaagtgcggcgataccatcgagctcaacgaagaaatgctcgatgagggctccatcgattgcccgaactgcggcgaaacgctggagttcgacctcgaagaagacgattcctgcgattgcggcgaaaactgcgactgcaataaggaataattttcgggtcatataaacctgtaaagaacgggagagtcgttttgcggctctcctttttcttttcgcacgggtgaatttaggtcttgcaattatatgctgtttgtgctataatttctaagttccgatatatagtcgggccattagctcagttggttagagctaccggctcataaccggttggtccaaggttcgagtccctgatggcccaccaaagcaatattaaacaaagccctcaagaaatcttctttcttgggggctttggcttttgcaaatctttgcaatgaaatgtaaatatgaacgcttaggcggtactgtctgtatggcagtgccgtctttttttattttaacatgatttcgagaatttcttcaaaagaaacagaagtaaatcttgcgttttgcgtaatacagaaatttttgcagcagacgtcgaagtttccatgataacgttcacttatatatttcttgaattttgaagacacgtttttagaagcggtataggcataacgtgaattctttattagttgattatacttttcacgtatttcgcttggcaaaatcttggggcaaataataccgattttcttgtgcccattttgagaagtgtttaatttaatcgtatttcggataaaatctgcaaatttgtgcgggctgttatcggttcgtttgatctgaatacggccggtacgattgccaagcttttcaacagcggtaattacgaaaaagtgctcgcgcgtaatgacgatcggaatgacatcgatttctacgggcaagtttaacatctctgcgggtgctcttttgtatttactaatttgtgttcttacaagagctcttttaataaaatgtgtcattctttgggcggtgcgattactgcccaattttaatttgttttggagagaacttgccgtgatttttccgtttgatgcgtttatcaaatctatggcggcaaaccatttctctaatggcgtgtgtgaatcttgaaaaatcgtcccggcggtcacagacattttatatccgcatttcttacatttatatttgacctctttcgttttccaagcttcagcacaaccgcagcgcggacacgtaaacccgtttttccatcgtatggaagccagatattctctgcattcgtaatcagatgtattcatgcttaaatttagttccataaacatccctttcttattgaatagaatactatacccgtttagttctgtcaagtgaatttaattgtgaatgtcagttataagacagcacaaaacaaaaaatttttggagggttgtcaagatgactgacttcacaatttcaacgaaactcgcaagagaatttgcaatcgaatgctttgatgtactatcacgagaaatcgaaaatgcaaaaagaaaacagaaagacgaaacgaaggaggtgaaaaacacaagtagccgtgaaaacacctccaaaaattaaatcaaatgaaaggaagagtaaaaaatgaaaattcaagatttactattaaaatttcagggtgtaaagcaggtatctgaaaatcagtacatggcaatttgccctgcgcacgacgatcatagccctagcttgtctattggactttcaaaagacggaaagcagattttactcaactgctttgccgggtgtaaggcagaagacgttttgaacagcgtgggactaagactaaaagatctgtacgacaatgatgaaaggaatgaaacaaatactatgagcaaaacggtctatacttattacaatgcggatggttctatcgcttataccaaaaatcgtttcgataaagcggatgggaaaaagagcttttcttttgtacgcccgaacggggaaaagggactcggcgataaaaagccggttccgtacaatttgccggaggtcattcgtgctcaaaaggtctacttcgtcgaaggagaaaagtgtgcggacgcggttattcaggcaggaagagttgcaaccacgcttaactgcggttccgggtcaaaatggctttcggaatataaggattacttcattgataaagaggttatcattcttccggacaatgataaccccggaatgaaatacgcgaagaaaattgtggagaatattccgaatgcaaaaattgtttgtctgcccagcttgccgcctaaaggcgatgtatacgactggctgaaagagggacactctatggaggaagtggataatttgccttatttggatattttggaacaggatgaaagcacagaattgaaatcggaaccctcaaaaagaaaatcgggtaaaaataaaacacaagaaaatactttactggaaattctccaagagcaaggtgcaacactgtttatcaacagcgaaaataatgagccgtacattgcgcttagacaaaataagcatttgaaggttatgaaaatcgagagcggagaatttaacacgtatgcaacttatatatatcgtgaaaaagtgcaaagtggactgaaatcggagaacacgaaacaagtggctttatacttaaaaggcaaaacgctttttgaaaatagcaaaaaagtgaagctctataaccgagtcggaaaagcagagaatgccttttggtatgatttgagaacggaagattggaaatttgttaaaattacagaagaagggtgggagatcagagaggaagataaaatactattcgatcgatataaccatcaaaaagagcagtgtttgccgcgcaaaaacggagatattcagaaaatcttgaaatacatcaacatcaagaatcagaaaaccctgtttttgtgttggtttgtcagctgctttgtgccagacatcgtgcatagtgcaattattgtttttggcgaaaagggcgcagcgaagacgacagcttgtacatttttgaaggaagccatcgacccgtcggtcgtaaaaaccttgtctttagataagaagacggaatcaaggttaataagcttgcaggaacactggtttttgccgtttgataatctttctaaaatcaaccaagatacgagcgacttattttgcagagccataacaggtgaagcagttcaatccagaaaattgtatacggacgatgaaagccatttcttcttgttcaagagatgtctggctattaacggaatcaataatgtggcaaacagctctgatttattagatcgttccattcttttagagctgtctcgtgtcaatgaagaagatagacgagagctaacagagctggaacgggaatttgaagaagacctgccggatatcctcggtggggtgttcgatgtgttctcgaaagcgatgcgcatttaccctgatgttcatttgagaaaattgcctcgaatggccgacttttgccgttgggggtatgcaatcggtgaagcattaggtggtcaggggaagaaattcctttcggagtacagtgtgaatcgtgaaaagagcaattatgagttgattagttcagacagtgtagccacattgatcattgattttatggaaaacaaaagagagtggaagggtttggtttcggaattatggaatcatctgcgtacagcagccgatgaaaccggcttaggtttaaaagctgttccacctgcagccaatgcgctgtcccgtaagctcaatgaattacatagtaacttgaagaatgtgggtattgagtttaccatcaaatcaactgcgaaaggaagtctcatcacactggaaaacgaaaaaatatctcaattacctccgtatatccaggaagataaagaagagcaagacgaggaggtcgagttttgatggaggtatggagataatgacggtattatttccaaataatctcccttaagaaatacattgtataacaaaagccattgaatccaaaagaggggttcaatggctttttctgtacagttaattttaaggttagaggttagcaatgttataaacagagtcaccaatcgtaaactcagcgcttccgtcttcattttcattgagagaaattccaagaccttgaagctcatagatttgcgaaagaaaagcggcaacatcttccggggtaaacatacaacggttcacagacagatcatcagccgcagtaatcggtcttttgcgtatcttcatgcgaatatcctccttccgtttgttatctcaataatatataaggtgcggctatttgagataaccggcttttataccggataaggcaagggagtatgcgtaggtaaaaagataggggagacatgagcacatttgatcttggcggtgtagcgccttgttctgaaagggttattctccttccacgcccagtaagatattaacagcctgctgtatttcaggctttgagcgatatgcccgaatgacctttcgttcatggtcggtcaattcatcagtggataaatgaacgtcaagcaggtcgcttggtgaaacattcaaagcgcggcaaatgtcggcaagaatatccgcgtcggggcggttgatgccttgttcccagttggatacacgacttttggttacatttattttactggctaattgctcttgcgttaagccgctttgcttgcgatataaacgtatcctgccgccaatttcatatttcacggaattcacctcattctatgaacattatacgcgaaaataaataaattgcaaggatgaaatcaagaaattctgtacttatacgttgacttcacagaaatactgtgatattataaatacaagtacagtaatactgtatttgcggaggcgtaaatatggaagtttacaaaaaagtgcgagcttacatagaaggaagcggctgcgggcaattcgcggtcgcacaaaaagcaggcataccccaagtggactttgatgccatgatgaatggagaaaaaaccatgtacgccgatgacctgcgcgcaatttgtctcgccctgaatgtaagtcctgaaatatttattgaagtggataaagagtagtgcacggggggaggaatatgaagaatattgaaagagcagcagaatttgttcttctcatggataaacagttgaaaaaccagctttttgtagttaatggagaagttcaagggaaaaagctttgggagaacacattcatcaaacatcaactggataaaagagatgcgggcgataaattctcggtcggcgaccatattcgtgcaatggcgtattcgttgttgtcctccggcgcacagtggagcagattagagccgtatatcgatataaataccggcgaaatatcggctattgacgatttattttgccaatatgatacagaaaaacttctcagttgtgatccagaagaaatttcagataaaattctatcttataaactcggttctccgtacaccaaaaaacaaatgaacgcactgataacggaaaatgtcagcaaacttctttcgcttgaacggcaatatggaagcgttgatagcttctatatgaaaattttggttaaagatgaaacgcagaagacactcgtgaaagagctgtcgtcaccgaaaagcccacataagttcactcaattcggcgaagcgctcataacggagtatctgaaaaatgttggttatgatatagcaaagccggataggtatatccggcgtattttaggcaggaatattttagattgttccgagcacgaaaatgcacctgcctatgaagcgatagacattgtggcggctattgcaaggcagttaaacagaccggcagcggaggtggattatattctctgggcatattgtgccaaaaactatggagaaatatgcacgaagaataatccgcactgtggcaggtgtgttgtaaaaataaattgtaaaaaagcggaggtttgaaacaatgggaaatattatggaagaagctttcaccgcttatacaggcagtgaaaaagtctttactttaaatggtaaagagttggtgatcccggcaagatttgatgcctttattacatatcgcaccaaattcatgaaacttgccaaagcatgtgcggataaagcggccgaggagtataaagaaaaaatccatgacctcgacacattcagaactttattccaagacatttatctggaaaatttgaaaatcgtcagcagcaaagcggttgatattcttgtgtctgaaggtatttatcagttctccatcgatacttttagcgcaaagaatattgaaacctttcacacggccttgaatgatttgcgtacaacaaatgaaagtgttaaattgacggaacaaaacaatgccaaagttacgcagaacctcaaaaacggcatcggttcgctgtttagtaaccggggaagcttcgcacgggggcttgtacaaggcgcggtggaaagtacgcttgaaggttcggaaattacagcgccgcaaaaagcggaactttatcagcgaattcgcacacaccttctgctccacaatgtatttcaggattattggaacgcagtcattactttggtggggattttacgagaaaacggtaaggatatttggcttggcgacagtggtaagatcgatgacataaacgcagttcttgaaagtgttcataacccgaattttccgcaggaaaaagttgcggatgttctgtttgattgtattttgaaaaaaccgaatgcggctgcgatttataaaaccatggaagaaaagtttggcctaacagatgaagtacagaaaatattcgattatttcatctacccggattttacaaagattgtgtataccgaaagcgattttccgggaatggtgccggcaaactccaatatggtgccgggtcaaaacgccccggaagaacccaaaaagaaaaaaggattattctcgttcatggataaggaaagcagtgaaagtgtgaaaaagggcttaaaaatcggtgcaggtcttttagcgacaagtgtgcttttggcggcatctaaaggtaaaggtggaggcggagacagtggatataaagaccttatgggtagcagtggatgtatgtatggcaaaaaaaacgaaagtggaatgcgagtatcttgtgatatctattgccctttgtacgaatactgctcgcgaccttatggacaccactaattaaccctataaccccaaacatctcttttcgtttataatcaaatagtctgataaacagccgtagttcttagggattacggttgttttttataaagtaaattgggttggccttttcgcttataaaattgctaaatattaacgaattattaactgatttgaatttggcaaaatactgtcttataataatatcagactgaaagaaaagaggttcttgcaatgatttatggttatgcgcggtgctctacaaatgaaaagctccaggatattaaccggcaggtcagagaacttaaacagcaaggcgcaacgggtgaaacgatttatctggaatatgaaagcggcgcaaagacagatcgcgcggaactgaataaactgcttaaaaccgtaacggttggtgatacgatcattgcgacggaagtcagcagaattacacgcggtacaaaacagctttgtgagatcatcgagtttgcgaaagagaaaaaactgaaattggtgctcggcagctttgttgtagactgcagcaaagagcttgacccaatgacagaaggaatgcttaaaatgatgggcgttttcagcgagatagaacgaaatatcatcagccagcgcgtgaaaagcggaatggaaaatgccaaagcgaaaggtaaaacggtcggcagaccaagtgtaaaggcggacgacataccgagcgccttttacaggcattatccaaaatataaacaagggcagttgacaaagaaagatttgtcgcggctttgcgaattatcttatccaaccgtatacaagtatctcaaaatcatcgaggaggcaaatcatgaaggttagtatttattcgagagaagaaattgaaaagttgatcggcaaagggttcccggagaaaacagcggtcatcagcttttacgacccgccgaatattcgaaccggggagatttcggaaccggtcgattataaaggcttgccggaacgggtttttcaagtggaagttcatgatattgatatggaaacattggaagaatttggtttgtcgtttgatacgtatttcccggaagcggaacgccttgcggattttatacgaaaagctcatgatgacggcttcgatataatctgccaatgtgaatacggtcaaagccgcagtgctgcttgtgcggcggcaataatagaatattacgagaaaaacggaatatccgtatttgccgattacagatattatccgaaccaactgatttttaacaaattgttggacgcactaaaaaacaaggaggtcaatatttgatgttagcggttatttatgcgaggtacagtgatagcaagcagagagaagaaagtatagagggacagctgaaggtttgccatgaatatgcgcaggcaaacggattctccgtaattcatgaatacgcggacagagccaaaacaggcagaagtgatgatcgataccagtttcaaaaaatgctgaaggatgcggagaaaaagcagtttgacacggttattatttattcgtccgaccgtttcggaagacaggtacgccaagtattgaataatataaacaaattgaccgagctgggtgtctctgttcgttccgccacagaaaaatatgacgattctccgtatggcagctttgccaatctggtaaaaatttgtatagatcagttttattccgataatttgacccaaaaggtaaaacgaggaatggacgtcaatgcggagaagtgcttatccaacggagggactacaccgttaggatatagaattcaaaatcataaatatgttcttgatccgcagaaggctcccatcgtgaaagaaatttatacgaaatatgcgggaggatggagcgcaaaacaaatctgcgacaatttgaacgaacggcatataaaaacggcaaagggagcacagttcaataaatcctctttgcacgtgctgctgaaaaaccggaaatacttgggcatttacaaatacaaagatattgaagtggcaggcgggatgccgagaattatcgatgatgcgttatttgaaaaagttcaggataaaatgaagctgaataaacaggctccggcgcgggcgagagcaaaggccgaatatcttctgaccactaagttatattgcgggtactgtaagtctatgatgatcggacatagctcaaaccaaatcagtacaaaaggggtgatttacaactactacaagtgtaaaaattcgggcggcagaaagccgtgcaaaaagaaaatgattatgaaaaattatatcgaggatgtggtcgtggaagaatgcaaaaagttacttaccgcgaagaatatcaataggatagcaaacgaggtcgtaaaaatctcggcacaaaatgacgatgtatccgagcagaaaaggttagaaggggaattaaaaaccgctgaacgggagaaagaaaaccaaatgacggccctccgccagtgttcgagtgatgaagtgcgggaaatgcttatcatagatttagaaaagctggcggcggaaatcaaagagcttgaacgccagattgaaatcgaaaaatcacgtcattacgttttaacgaaagaacaagttgtgcagagattaacagcactttcaaaaggcgatatcaaggacaatacatatcgacggacgttgataaaactatttgtcaataagatattcttatatgacgataaattcacgatcacgttcactaccggcgacgatgaagttgaaattaccgatgcgctgttaagcaaaattgaaagcggaaaaaatagaaaagaagggacttctttttgtctatcaaatgttgtggcccaccaaaaaagagttttgtcttttgacaaaactcttttttcaatgtgcgggtcgagaatgacgagtaatttctgcggcccgcagtttgtgggcatgtggcgcgaaaagctgtggcacaaagaaatgaccgcaacgatccacagcgcaaaattgggcgaataacagcgaaacagagtgtaaaagcacgctttatctggggctaaacacagatataagcgtgcttttgcgtagaaatgcccttgacaaattccgagcaacataatagacttaaaacgtctaatcgggatagaaaaggggcaagagcatgacactgaaagacctgccgatcggcaaaacggcaacggtgacgaccgttggcggcgagggcgcgctgcgccagcattttctggatatggggctcattccgaaggcggacgtcaccatggtgaaattcgcacctatgggcgaccccgttgaggtgcgcatacatggctacgagctgacgctgcgccttgccgatgcggaaaaaatagagatcgataaaattcgcgacacgataacggagccgatgcggccgcaggacgcgcgcccgatttttcacccgggtctcggcgagggcggcaagtaccacgtgcagaccggcgagccgctgccgcccggagaaacgctgacctttgcacttgcgggcaatcagaactgcggcaaaacgacgctgtttaaccagctgacgggctctaaccagcacgtgggcaactttccgggcgtgacggtggaccgcaaagacggtgcgatacgcggcgtggaaaacacgctcgtcaccgacctgccgggcatttactccatgtcgccatactcgagcgaggagctcgtcacgcggcgcttcgttttggatgagcatccgcgcggcatcatcaacattgtggatgcgacgaacatagaacgcaatttgtacctgacgatgcagctgatggagctggatgtgccgatggtgctggcgctcaatatgatggacgaggtgcgccaaaacggcggctctgtgcgcgtgaacgagatggaggagatgctcggcatccccgtggtgccgatctccgccgcgaaaaacgagggtattgaggagcttatcgaccacgccgtgcacgtggcaaagtaccgggaagcgccgggacggcaggacttctgcgatgtgaacgaccacaacggcgcggtacaccgctgtttgcacggcattatgagcctcattgaagaccatgcccacgatgcgggcatcccggtacgctttgcggcgagcaagctcgccgagggcgatcagcttgttttggaccggctgaacctcgaccagaacgaaaaggagacgctggagcacatcatcacgcagatggaaaaggaacgcgggctcgaccgcgccgccgccattgccgacatgcgcttcagcttcattcaaaaagtgtgcggcactgcggtcgtaaagccgaaggaaagccgcgagcacgcaagaagcgtggcgatagaccgcattttgaccggcaaatacacggcaataccggcgtttatcggcattatgggtcttgtattctggatgacgtttaacgtcatcggcgcgtttttatcaaatttactggacatgggcatcggcgcgctgacggatattgtcgaccgcggcatgacggcagcgaacgtgaaccctgtgctgcactcgcttgtcatcaatggtattttcaccggcgtcggcagcgttttgagctttctgccggtcattgtgacgctgtttttcttcctctccatgctggtgcattggaagcgaaatccgacaacgtgccgcctttgtttaggcggtacgtttttgtcggtaaagaggttaaattataggcaacggtgaccttgtaggtgttatcgtcctcatcccatacagtgacggagtttacgaaaaggtcaatgagcatacggcagaactcttcatcttcaatactgccgccccgaaactgttctaaccaataaataacctgggctttgtccagttcaacaatatcctcagattctttcttagcctgtgcttgcaggtctttcttttctttctctaattcacccatacgcttcacaagcatatctggggctgacccggattcaatagctttgagaagatggttgagagataagtctacttggtgaatacggtcacgaatagttgggagggctgaatccagttcaatctcatgctgattcttctcacaggcaatagtagcaatctgttctatatattcatccgtaaggagtgatagagcgtcctgggcaaccagtctttctatgaactccttacggatattctttttcttgcagtcaacattgccgttcttctttccgtaacactgatagtaacagtagtttcctgcattgcaatttccgttcattttactgccacaatgcccgcagaatattttaccactaagcagatagactacttttgctttgttcctggcaggtgcatttttaatcttgccgactctaagttgcaccctgtcccagaggtctttgtcaatgatagcaggtatagcgtcctctgcccggtagtcatggaaggtatagactccgatgtacctctcattacggaatattttggtgaaagaactctttccgaaagctgtaccctttgaggttttgtacccacgggcattaaactggcggcagatttcagcaaccgtttctccgtctgcatatttctcaaaggcttcttttacaatgggagccgttttagggtctattaccagtttcttatcttcaatcttatatcccagaggaattgcccctcctatagagttatgcttataggctgactctctcataccacggttaattttctgggatagttcggcactgtagaactcagccataccttcaagcacggattccagaatgataccttccgggtcattgctgatattctctgtggcagatataagctgcaccccgttacgcttcaagcgatatttgtaggtggctgagtcataccgggaacgggcgaagcggtcaagtttgtatacgattacagcgtcaaacaagcccttctcagagtcctttatcatcttgaggaactggactctcttctctatatccttactggcagatgtggctctgtcagcatatatctctacaattctaatattatgccgcttgcagaagtcacggcaaacacgggtctgcccttcaatagattgctcagtctggttatggcttgagaatctaacgtataggcaggctgtttttatatcctcatacatggttcttcctccattctatgaaatcaattacccgacactttcgttgtccccttttcgcttctcacacatacaggtggtaataatgttgaatctgccttgcggggtagcggaacgaaatgcgtcaagcagtaattgctcttcttctgttagggaaatctctactttcgggcaaggtgaatcagataaacagaatagataatcagtagaaacgtgaaaatatttagccagtcttagtacagcttcggcactgggcgcataggttccttttttccatttgctaaaactgccattagatatgcctgtagcagcttcaagggcttttactgttaatccagattgtttttgtaactccaaaatgcgttctaaggtatccatgagaaccctcctaaaaataaatttgggaaaactctaaaatacctgttgacaatttgggaaatctctactatactgagtatgtcaacaaaagttgtttacagggtataagaaatagcccctccgggctgtaaattttaccccgcagagttttcaatggtatatgggtgtggtagcttcattataacctttgaagagtctgttgtcaactttagtttacaagattctaatatgaaaggaggaagcggaaacgtggaggaacgtgaaaacattcgtgagcggcttaaaaagcacaagctgtcttacgtctggttgattggtcagcttgccttgcggggtattgtgactgataagacagagatgagttcagtaatttcgggaaccagaaacggtactaaagcggacgcaatcattgaattgtccatagatattctggacaagtatgagaatggttccgtcctcgttgatggggcttaatgcttcgcacattagaaggaagcgcactttgttctgtccttgctgacagggtgaaggaatacttcaaagatgaggaaaaccgcaagaagtttgaaatctggtatcaagaaaaatacggtaagccgtacaagtggaggaaaacacaatgaaagtaaaaagaatgattaagtctgacgttgatacttttaaggttggagatattatcaaagtcaaactcacggacggtgtgaaggtgcaggctatggctatgcagcaggaagaggacggcatgattttctgcctggttgattgcctgcctggtgagtacccgatgaacagcacccgtaccaatgaaggaggttacgaagagagtgacctgcgtaaaaagctgaatggtgagattctgaatctcttcccggttgaactcacggatatgatgactccgttcgacaacggtgacctgctccgtctgccgactgagaaagagattttcggagagaactactacggtgagtatgaaagcccatatgtgaagcagtggaagcccatgaagaaacgcagaaaccgtatggcgtttgatggcagtaaggatgagaacttacagtggtactggctgatgaacaaggtcagagaatccgccgcttacttcgctcgtgtggactacctcggggatgcgggcaatagctacgcttctcactctcgtggcgttcgccccgctttcaaaatcaagaatcgttaatctgcacctccttgtgaggtgcagtgggagcagaagcctatgaagcaagtgaacaaaacaatgggaaaccactttgaagaggaactgtgtgaacttctggcagagcaaggtttctgggcgcacaatctggcacaaaaccaggtaggacaaccctcagacgtgcttgcggttcgggacaacatagcagtcttgattgactgcaaggtatgttccaacaaccgcttcccgttatcccggattgaaccaaaccaggaagcagctatgaccatgtgggaagcccagggcaatgagcattgctacttcgctatgaagctgaatgacggacagatttatatgattcacttcgatgagttatgtctacggcagctttacgggcagggcagtattactgagtcagagtttccagagtacaagacctttcaagagtggttggaggaaatggatgtttatagaaatcgggagccgattgaaaatccttgacccctcacccgaactgattaagtggtgtaaagagaatctggaaatgacaaacccagagtatcagcaaaaagcacgaatgcacctgtggcttgggaataccccacgaacgctttatctctatgaggtgaacggaaatagcttgattctcccattcgggtgtctgagagcaatcctgccgcttctggaaggagatgtaaggaagctgttcaaagagccgaagaaggttgactacggcggcaaggttccgctgtatgactaccaggaagaagcagttgcggcaatgctgataaaccactacggcattttacaatcccctgccgggtctggtaagacccagatgggaattgccctggcgtgtgcgttaggggtaaaaaccctctggctgacacataccaaagacctgctgacgcagagcaagagccgtgcagaacagtatgttgattcagaactactgggaacgataaccgaaggaaaggttaatatcggcaaggctatgaccttcgccacaatccagaccatgtgcaaattggacttagaccaatatagagatgagtgggactgcgtgattgtggacgagtgtcacagagtaagcggtacacctacagcggtaacccaattctcaaaggtactgaatacgctgtgtgccagacataagttcgggctgtcagcaaccgtccatcgttcggacggcatgataaaagcaacctacgcaatgttgggtcaagtagtatggactgttccagatgaagcagtgaagtccagggttatgacagtaagtgtcctgccgaaaggtacgaacgtgaagctgagtcctgcttatctgaacagtgatggcacaattaactactgcaaaatgattacctatctcacagaatgtgagagccgaaacaagattattcttgatgacttagttgagaaccgtgagcatttcaatctgattctatcagaaagggttgaccatcttaaatacctgtatgagcagttacctttgaagttaagagcgcaggcagcggtgatagatggaaagatgaccagtaagaagcggaaagctgaacgggaacaggctattgaggatatgaggactggcaagaaacggtatctgtttgcaacatattccctggcaaaagaaggtctggacattcccagactggacagattgtacttaacaaccccccagaaagactacgcagtgatagttcagagtgtaggacgtattgcccgaacctttgacggtaaggagcagccaatagcttatgactatgtggactgcatacggtcattgcagaaatctttcaaacaacgctgcaccagttacaggaagtgcgggtgcgaatttataggagattgacataaagaataaagttctgaaaacaatcggatatatcgtaggcataacgtggctgttcactgcctgcgctctggatgatgaagtctacggaatgacaatgctcttcatcaatgttctgtgcatggcatacctggcactgttctcctgggcaaataactggtggtatgacttggaggactacgaagatgaagatgacgaagagtgtgaagaaccacttcactacggctcaacttcttctgacaggcgtagaagagagtatgggagtcgaacccgacaagtggggcataattcctcccgaacactccaaagcgtcaatgattcgccgctgcgtacaggcaagacaagaaattttgcaggtacaaaaggctctggaagaagggcggtgtaacgatggttgagggaacctacatattcgactgtgaggtatttgcccatgactggctgtttgtattcaaagaagtagccacgggagagtacacggttatctggaatgacaatgatgaagttctggctttcatggagcgtaacccgtatctgggtggcttcaacaacaagcactacgataatcatatactcaaggcagttatgtgtgggttcaccccagaacaggtgaaggagataaatgacctcatcatcgttcacgaattaaacgggtgggacattcccgctctgagagagtaccgggtctattttgacagtttcgacctcaaggatgattgccaggacggtgtatcccttaaagggattgaagcccacctgggtatcccgattgaggaaacagaggttgatttcaatgttgaccacgttctctctgaatcagaaaaggcacagactacttactactgtaagtatgatgtggacgcaacggagattcttttcaagttgcggcaaggttatctggataataaagcggctgtaggcaggaagcgtggtctgacagacaggcaggctatgtatatgaccaatgccaaactgacaagcgtgtacctgcaagcccagaaaccagagaaaccatggacagacgaaagagattatcagtacccggacaagctgctcagacagtatattccgcaggaagtatttgacttctttgataagctgcatgacccgaacattccgaactaccttctgtttggtggctacgatgagcagggtgtgaagcacaagggagccgccctggacttctctattggtgagtgtaaatgcacgatagcctacggaggtatccacggtgcaattcctacttatgttgaagaagctactgagggcaggtcaatccgaaacaaagacgtggcaagttattatccgcacttgatgaccattcctctctcaaagggacagaaatacggcttctgtagccgcaatatcccatccccgcaggtatatgtagataccctggaagaaagagtacaggcgaagaaagccggggataaggtcacggcaaacgctttgaaactggtactgaacaccacctacggaaccatgcttaacggtaaagatggcgtggctttcaatgacctgtatgaccctctgatgggacgttcagtttgtatcacaggacagcttctcctactggaactgtcaatgcacttggtcagtgagtgtccgactctgaaaatcattcagcttaacacggatggtattatggtgagtttcgacaactccgatgaagcaaaatggcaggaaattacccaggaatggcaggacagaaccgggtttgaactggaagaggatttcattcagaaaatcgtgcagcgagatgtaaacaactacgttgaggttcctgtgggtgacggcaagccaaaggtcaagggcggcgcactggttagaggtattctgaccaatgcaaacattgacttcaccaaaatgggactccctgcttgggagaacatgagcggtggtgcatggaatatcaacaacaatgcggttatagtcgcacgggcaatccaggattactttgtaaagggtgtagacccagaagaaacgataatggcaagtaagaatatcctggacttccaggtgattgcaaaggttggaggtaaatattccgggtgctatcaaatggtgggtgaagataaggttcccgtacagaaagtcaacagagtatatgccacggcagacagacggtatggaaccatctacaagacccacgctgtaacaggcaaggacgcaaaggttcccagtctgccagtacactgcatggtagacaacaacaatgagttggctattgatgtggtagaccgtaactggtatctgaaactggcacagaagaatatccgtgagttcctgggtgtgaaaccaccccggaagaatacaaggaaaatcaattccttgaaaaagaaatctttagcattattcgattaaggaggataagacaatggaagaaaaaaaaattagcaaggttgagttcgatgaagcggtgaagcaggcaattcacgaacaggtcaatgacccgaacattgagggtatgggcaaattgctcattccgatgatgggtatgctgttcgcaaccaaagtaaaagagattctgttcggtaaggaggactaagattatgaaattcagtgaagctgaaaaggaactcaaggcaggcaagaagattaagttacctaagtgggagaaagcctactggtacatgaaccaggacggtgaactcatcaaccattttgagggaggtgaggaacttccgactatcgcactcttcccccgtgacatgatttgggtcacccgtgatgactgggaaatcgtacatgaggatgagccgaagaacgtcaacgaacctgcgggagagatgaagaaactgcgtaatttcggatgggcgattgctgctctcaagaagggcaagaaggtagcccgtaagaactggaacggcaagggtatgttcctcttcctggcacacagcatggatattaccacggacgctgacctttcttgtgtgaaagaccttgaaggtgacctggtatccccgtccatcgttatgaaaaccgctgatgaccgtttctgcgttggttggcttgcaagtcagacggatatgcttgcggatgattggtacgaagttcagtaaagataaggaggacattagcaatggctaatatttacgaagcaatgaacgtgcgccagaagttggcgaaagcaagactgtactttctgaatcagaaggtacagaagtcaggcaagaatatgcaccttgagttcaagtattttgagttggaggacattgtgccgcctgcaacccgtatcttcgcccgtgtgggtcttaccacggagattgatttcacggatgagggtgctgtgatgaaggtctacaacgtggacaacattgaggaagcacctatgcagttccgtgttccgtaccgtgaggtgaagccgattgtgagcaatgcaggcaaggaagtcaccaaccctatgcaggctcttggctcttccatcacctacctgcgccgttacctttggatggcggttctggatattactgaaccagatgacattgacgcaaaccttggttctgatgaccaggtagaagatgaagagattcctgctccgaacccggaaacggctaagaaggagaagaaaaagaagtctgctgcacctgctactccgaaggagcgtgagaaagcgaagaaggaaatgacgggtactgatggacaggctgatgagttgcagattaaggcactcaaggaagcctgcaagactctgatggacaaggattccgaccaggaagagtttgttcagcagattgccatgaaaaccaatggcttcaccaatgtcactcgtgcagcgtgtgagcagcttattcagaaccttggtgagatgattgccgcctacggtgagtaaggagggctgagtcatggctgacaatgtaaaccatcccgctcattatgaaaccgggaagtttgagtgcattgacgttatggtggaaacccagggagtagaagccacgcaggacttctgcgtgtgcaacgctctcaagtacgtctacaggcacaagaagaaaaacggcatggaggatttgcagaaagcaatctggtatttgaacaaagccgttgagttggaggaagcaaagaatgacaaaacgacaaatcattaagtggttggagtcgcagagcgaaaaggcattagccgaagtagaaacccagagtgaaaaggctctcaacacttactatgcagacaggaatgagaaaatcggtctggacgttacggcaaccgctatttcggctctcatgcagcaggcttatagtctgactgaatccttcaaagagaaggtgaaatctgaatatccgggtactgataccctctgcggatattacggctctatctcctacaaactggcaaatatgagttctcaagctgaaatccgttcctgtttgcttaaagagtttgaggacggaagaacggaaatcagaaagggtatcaaagtccgaaagaatgaaatgattaagggtatcaccgacaactacaggaatgtgattgccaatgtaagcaatatgaagaatgcaaaactggcaatggaatatctcaagaaccttgggtttgacttgagtgacttggtaaaagccgatgagaacccagtaaccacggcattgtccgtggaagtggatacacgatttctgttcataggaggtaagaaaaatgaagtggaatgaggataagaccatcactatcaccccgccgaagcgtcctaagaagattacaggtacacgctttgcggcgattatgggactgaacaagtggacaaccccgttcaacgcttggtgtgcaatcaccagaacctacgaagagccgtttgaggacacaatctataccgttgcaggtaagacgattgagccgaagcaggctgagtttatgaagaagtcctattttatgaccaacctcatcactcctacggatgtgtacggggctgactatttccagaaaacctggggtgacttcttcaaggacagtcccatcttcggtggtatgtgggactatcttctggttgacaaggacggcaagcctaccacggttcttgagatgaaaaccacgaagcgttctgaggactgggttgaggatgtcccggagtactatgctttgcaggctgcgctctatgcgtaccttctgggtgtagatgacgtgattatggtgtgtagcttcctgggtgacaaggactatgagaacccggacgcatatcagtgtagcactgagaacaccatcgttcgtccgttcaagctgtctgagcgttatccagaactgaaaaagaccatcaagaaggttgagaagtggtggaaaacccacgttgagggcggtgtttctccgaagttcgatgagaaagcggacgcagacattctgaaagttctgcgtgataacaacctatccccggacactgacattgctgctctggttgccgaagcagagcagttgaagaaacacattgatgaggtcaagggtactgtagctgacgatgagaagaggtataagacgattaccgatatgctcaagaaggaagctatcagccagttcaaggagggagataagactgttactatcagcggtgcttccttcgattggattacctctaagaccatgaaagaccctggctacgatatggcgaaaatgcaggaggacggcattgatattgagaagtatcatggcacacccgaaccgcagtatcgctttaccccgaaagccagaaaagaatctgcttaatcagaaaattctctgattatataaacaatttcaaggaggatacttaaaatggcaaagattggactgagtgagggtttcactcttattccgaagggaacccacgtttttaagattgttgaggtcaagtacaaagaggacttcggcaagatggagattgttatgcagcttgcttcgggtcagaagcacactgaacgtttctctctgctgaatgcagacggtgagccgaaccagggaggtctgaatgctttcagctacttcgcaaagactgcactgaatgactacactctgacggagattgaccatgaggaacttgtcggtcactatatccgctgtgaggtagaccatgaagaggttgagtctaacaagactccgggcaaaatgctcaagttcgttcgtctgggcgataaggagcctgcggatggttttgacgaagcggaagcccctgcaccaaagaaggaaagcaagcctgtggctactgccccggctgctgcacctactgaaaaggcaagcggtaagaagttcgacctggacagcattcttggttaattaaatgacctgcggagagggagaagtgtagctttgaactctccaatggtctatattctataaagttgaacgaaaggaatgaagaacatgagtgaacgagataatcgtgtcaaagcgtttgagaagctgatgaggggcgggctgtccagtacggatgtgttctgtctgaaaaatcagttgatggcaatggggttctttacggctcctgcttctacgaagtaccacggaaactatgagggcgggctgtttgaccatagctttactgtaacctcttctctgctttctctgacaaagaggatgggtctgaactggaagcgcaaggcaagcccctacattgtgggtatgctccatgacctctgtaagtgtgattcgtacattcacaacccggatggcacatacagctacaaccccgacattcttctgccgggacacggtgacaagtccgtaattctggcacagaagattgttgacctcacagatgaggaaatggcttgtattcgttggcacatgggagcctttgatgacaaagagaactgggataagtacggaaagtccattgagaaatacccgaacgtcctgtggactcataccgctgacatgatggctgcacgaattttcaaaatttaaggaggaaaagataatgggatttacggaagttctgacgattgtatttgttgttttgaagttactgggagttatcacctgggcatggtggatagtacttctcccggaaattcttgcggtagcgttttacctcattctgcttctggtgcagattgtaggtttccacaaggtaaataagagtatccgcaagcactttgacgagttctaaaaggagaatagcatgaagaaatttgtagcattacttttggctctggtaatgggagcctgcctgcttacaggctgtagtcgggagtccgacatggtttcctacaatatcggaaaggaagccgacaacttcaatgtaacccgccgtctgacggttatcaatgcacgaaccgacaccattctgttacagcttgagggtacgttctctctgagcaataacagcacaaacgaactggaaattatttgtgaagtcggtgagggcgtgtaccagaagcattttgtgtatctgaatgactacacactctatgtggttgaagatatttcgggttctggtgttgacaagtaccattatgaaatcaatttcctgccgcagtacgggttcaccattacacacaacgattaaaggaggactccgacatggtaacagtattgattgcaattctggcttttatcatcgggcttatctgtggtgcagtgctgcttgcggcagtagccgtccttgcagcgcatgaccagatgaacgatacccctctgagtaaggaagaatggaaggaggactaaaccatggttattacgggcatggctcattttcaaagcgtatgcaaaagaaaacttgtgaactggtacaacaaccaggttggggcaaccaaaattgacctggacaatgtattcatcgtttggagttgtaagaccttgcagaattacaagtgtcttgcgtccaccactgtaagcggagatggaatttatgcagagtacacatataacggcgataagcaggagttgtacgaagatatttatgacaaggtgcagaacacttgtcacacagaggaataaggaggacgaaaccatgacaggtaaagaataccaggctttggctatcagaacttgcagcattccctacgattgcaaggctgaccgtctgtatcatgcagtgttcggtctgaatagcgaagcgggagaagttgcaggtatcttacagaagaagtaccagggacatgaagtgaaccttgaacacatggaaaaggaactgggagattgtctttggatgattgcagaagcgtgtgacgcactgggtacggacattgatacggttatgcagatgaacattgacaagctgaaagcccgttacccagagggctttacggtggagaactcccttcatcgtaaagcgggcgatatttgatgaactatcacaatatcacacacgatgacatgaacaatggtgacgggttacgggtggttctctgggttgcagggtgtacacaccactgcaagaactgccagaaccctatcacctgggatttcacagacggggttgagtttgacaaagcagctttccatgaaatctgcacggagttaagcaaaccttatattagcggtcttaccctttccgggggtgacccgctgcaccccgttaatcgttgtcagattttatggcttgtgaagaaggtcaaacagttcttccctcacaagactatctggctctataccgggtacacatgggaagagataaatgctgacaacttctattgtagagcaattctggactacattgacgttctggtggacggacgttttgaagaagcattaaaggacgtgggttatcactgggcaggttccaccaaccagagagttatcaatgtcccgcagtccttaaaggaagggagggttatactccatgaaagtaattaagaaggacggcacgattgagccgtttgacggtcagaagattgtcaatgcagtcagcaagtctgccgcccgtgcaatgattgagttggacgatacccagtaccatgagattgtatctaaggttatggctatcgtcactgagcgtttcccggaacgggttcacgttgcggatatgcacaatattgtggagcaggttcttgatgaggtcaacccgaagattgcgaagtcttacagggattaccgaaacttcaaaaaggatttcgttcacattatggatgaggtctatcagaaatctcagtccattcgttttctgggtgataaggagaacgcaaacacagactctaccttggttgccacgaaacgttgtctgattttcaacgaactgaataagcggctgtaccgcaagttctttatgaccaatgatgagttgcaggcttgcaaggacggatacatttatatccatgaccagtcagcccgccttgacactatgaactgctgcttgtgcgacatttcctctattatgagcggcggctttgagatgggcaacgtctggtacaatgagccgaaaacccttgatacggcttttgacgttttgggagatattatcctggctacggcttcacagcagtacggaggattcactgtcccggaggtggacaagattctggctccgtatgctgaaaagtcctataagaagtactgtgctgagtacatggaaatctgcaatcagcagacattcacccaggacataaaggactgggctatgagcaaagtgcagcgtgattttgaacagggcttccagggtattgagatgaagctgaacactgtgggttcctcccgtggcgattatccgttcatcactatgaccttcggactggctactgatgtgttcggtaagatggcaagcaagactttcctcaaggttcacatggagggtgagggcaagccgggattcaagaagcctgtattgttcccgaaactggttttcctctatgacgaaaaccttcacggtgaaggtggcttaaatgaggatgtgtttgaagcaggtattgattgcagtagcaagaccatgtatcccgactggctgtcccttacgggtgacggctatgtggctgagatgtacaaaaagtacggtagagtaataagccctatgggttgccgtgcattcctctccccgtggtttgagcgtggcggcatgaagcctgcggacgcagatgacaagcctgtatttgtgggacgcttcaatgtcggtgcagtttccctgcacctgcctatgattctggcaaaagccagagccgaaagccgtgacttctatgaagtcctggactactacctggaaatgattagaggggttcacaagcgtacctatgagtacctgggtgagatgaaagccagtaccaaccctatcatgtactgtgagggcggcgtatacggtggacacctcaaaccgtctgacaaaatcaagcccctgctgaaacctatgacagcttccttcggtattacagcactgaatgagttgcagcggctctacaacggcaagtccattgcagaggacggagagtttgccctggaagttatgcagcatatcaatcagaaggtcacagagttcaagaatgaggacggttggctatatgcaatctacggaaccccggctgaaagcctgtgtggtttgcagattgagcagttccgcaagaagtacggcattatcgaaaatgtatctgaccgcccgtatgtgagcaattccttccactgtcatgtgactgaggacttaaccccgattgaaaagcaaaaccttgaagggcgtttctgggatatgttcaacggtggcaagattcagtacgttcgctatccgatttcttataaccgtgaagcagtcaagactctggttcgcagagcaatgcagcttggtttctacgaaggtgtgaacctctcccttgcttactgtgatgactgcggacaccaggaacttgagatggatgtttgcccggtctgtggcagcaccaacctcacgaagattgaccgtatgaacggttacctgtcttactcccgtgttcatggcgatacccgtctgaatgctgcgaagatggcagagattgctgaacggaggtctatgtaatggggggggacgaaacttgcatgacattggactggaaaatctcagattcgggattgtggaacaggctgtagacgattatttcagtttattagcaggatttatcaccccgacaacagactgcaatatcacagaactggaacggttcttttattctgactggttcagtgttttatgcaagttggaaccagattacattatagagaatctgaaaagaaaggcgaagaagatgattctgaaatataccgtatcaaagcagaaaggcagcagccgttattatgtgcatgaggtaggcagcaaagagcctatccccggcacactgggaactaagaagcaggctttacacagagcagcgaagatgaatgacctggactataaggactacatgagagtccgcagaagggatggtgcgagttgtgataaagattgatgaagtcgaaacctacggatggcaggcggctattcgtggtatgagaaacccgaagaactcctgggagaagtcagacagctatcctgctgtagattgtgggaaatgcggagtaattgaccgggacggtatctgtcatccgaaggaacatgactgcactccgtttgcctgctacgcagtcggtgacaatgacttgaagctgatggaaaccctgggtgctgcgggaactgaccacggaaagtacctgcgtatgattaccgtgaccgcagacattaccgcccccctgtactggtggaaggaatacgatacctacaaggtaggcactgtggcaaactcctgttccaccatgcacaaaatccaggcaaaagagttcgttctgagcgatttcagcacggaacacctctccgctacgaacctcattgtgttcagcatggtcattgacgctatgaataatgcccgtctggatttcttgcagaggaaggataagaaggattggtggcagatgattcagatgctaccgacctgctacaaccagaagagaaccgtacagcttaactacgccgttctcaagaatatgtaccattcccgccagaatcacaaactggatgagtggcgtgagttctgcaagtgggtggaaaccctgccgtacagtcagttaatcacaggataaggagagtgtgggaatgaaggattattccaaaataccagaggaattaaagaatatgaatcagtgggtgtgtgcctgggataactccaaaattcccatgaaagcctttgagaagaaagccgcttcctctactgccccggatacatggagttcctttgagcaggcagagtgggcagtagagaacggctattatgacaacctgggatttgtgttcgcagacaacggactggttggcattgatattgacgcaggctttgaggacggtcttatgacccctctctgcgccgatattatgaccgcctgcaagtcctacacagagaagtccagaagcggacgtggcgtacatatcctgctacggggtacacttcccttccatggtaagaacaaccttgcaggtgttgagatttacaaagcccgcaggttcttcattatgaccgggaagcagcttatctttccaaccatcattgagaaccaggaagccattgattatgtggtgaagaagtacttcaaagaggttgagaaagagaacggcgggaagtctgcactggtacagaagatatacactccgaagttcaacaagccagagggcggcaagattccagttcgccccgattacccgccgattgcttccgggggcagaaacctgtcactcacttccctggcaggagcaatgcacaacacgggctacaccccggcacagatttatgcggaactgaaatttgtcaacatgactcagtgcaagccgccacttgatgaccgagaactgcaaaccattacagaaagcgtgacgaggtacagacgatgagaagagaaactggaaatccctgctttgattgcaggtgtggttggtatgactctgaccttggatgtacctgtccttcacttgagaagtggtatcaatgtccgttagagccagaacccgactgggaagaaataatgaaggaggaaaagaaccatggatgactacgattattgctatgaatgcggaggatacggtgatgactaccacttggatgaaaacggagaatgggtaagcagttgtcctggctgtcctcacaatacattggaaggagattatgacgatgaatggtgagaaagacacttgtgcaacctgttcacacttcatcggtggcggtgactggaacctgtgttgcgatttgaaatacgatttatgttatagctgcaccccgaagtgtaacgattacaaagagaggaaggaggtacagaagagtgagtgatgagttatttcagttgtccaatggcaggtatatcacctctgaggacataagcagaaaactgtattacattaaagaccaccacccggaaactgcctaccaggatgattccacggggtactcctgggatgaagcgggcatggctgacctcttctctgagtgctatcagaatgacacccgctactgccccgaagcaaagtcctggtacacctatgagactggcaagtggcacaaggatgtgggtgcgcttttggtttctgcaaagattaaggagtttgtgcgactcatggctctgtactgcggagagattaccgatgaggaaaagcgcaagcagtacatggcttttgttgggaagatgggtgaccgccgcttccgtgaccgtcttatgaaggacgctgcggatagcatgaagattgcggcggcgcagtttgacactcacccctatctgattaactgtctgaacggcacttatgacctggaacacatgaagttccgtgagcatagatgggatgatttcttgaccatgcagaccaattttgaatacaccttgcaggaagttacctgcccacgatgggaacagttcatcaaggaagttacccagaacgaagcagacaaggcagactacttgcagagggctttgggttattcaatcttaggtacaagcaaggaagaatgtatgttcatcctccatggcaagaccacccgcaacggcaaaagtaccatgcttgacgctattcagcacttgcttggtgactattcaaccgtggctcccgtagaacttatctgccgtggtgaccgccagaagaacgcagaagcagcaaacccggtactggcaaagctgaaaggtaagcgtatggttaccatgagtgagtcagataccgcaggcaaactggatgaagccacaattaagcagtacacaggtggtgaggacattaccgcccgtgagttgtatcagtcggctatcaccttcaagccgcagtttaccatgtggctgtcctgtaatgaccttccttcggtaaaggataagtccctgtttgcttctgaccgtgtgcgtgtcattgagttcaatcgtcacttcactgatgaagagcaggataagggactcaaggactattttgaaaccccagaagcaatgcggggtatcttcacatggttggtagcaggctacttcaagtatatccgcttcgggctgaaaatgtcccagggtatgcagaaggtcattaaacagtatgagaaggacaatgacctggtactgcaattcctggaagagaagtgtgagcgtaacgcagaaggtaagacccgtgcgaaatccctctatgataactacaagatgtggtgcaagggcaatgggtattatgtatgcagcatgaagaaattcaatgcagaactgaccgcacacccggaatggtatgcagataaggcagttacccagggcgttttgttctattatggagtagctttaaggcaaaattagtagggttggtagggtaaaataagattttactataagttttcttagtacgcgcgtatctataaaaacttactgtaaaaattgaatttgccctaccaacctcatgccagacagaaaggagatagacatggagtcttatgtagaaagatggaagcgtgagcaggaagaagcaaagcagaaggaggtgcagaaggacaatggcagaagagaagaagatgggcagaccgaagggaagccgggacagaaagcccagaagaacagaagggtatcaagaaagcagtcctaagaatctggtgaaagccagagagaacagtcctatcatgcagtctcagaaggtagaaatgccagaagggtataatgcgaaggtgactgcctttatgatggagattatgccgaaggagccactggacttgcaggacgtgccagaaatggaaagacgattcttgaattatgtgcagaagtgttctgaatgggatatgaaggtgggcaaccaggctgcgtatatggctattggtatcacgaaggaacaggcgtgggaatgggagaacgttacgaaggggaaccctgcccgcactgactttatcaaaaaagttcgccagttctgcggcgtttttcgtgagggtcttatgcaggacggcaaggtgaaccctgtcacgggtatcttctggcagaagaactatgacggcatgaaagaccagacagaaatggtactcaccccgaacaatcctctgggagagcagaaggacatgaaagcccttgagcagaaataccttgagagtgcttatgacggttcagaagccgcagaagggacttttacagaaatcgcagaaagcccagaagggacagaagagcagaaagactgatttcaaaagtcgcagaaggggcagaagggcggcaacccctgcccgcctgctgcctgccctgcggcagacccgcccgcccaggctgcggggtttcaccatgttttcaaggcgtgggacggggacagaccgcccgccgcccgtggtgctgtcctgctgccgtggtgcaggcgtggacgctctgcgcccctctgcgggcttttctgcccgtcatggtataagtatagccccgcacggcttgcgcccgtcctggacggctctgcggggctgtgagggcatataggcaaatagacataaaagaaccccggcaggctgtgaacctgtccggggtttcgggcgttataaccatcgcaagcgggggcggttgtggtgcttccaatagtttataagccgctgcacctctgcggggttgtacattggtatattatacagttgcaagcccgctggggtcatataatagccttgaccatagcggggcagagtttcgcaccctggaagccctaaaatattacggctatcttgcttgttgcgggttctgagtcctacacgactatcgaagtttacttttataggggtagggataacagcagatagcgggcactgtgtagcggctataatatgcatgtttgctgcccttcctatttgtgcaaggcgttgtataagcggctgcacctgttttttgttagttgtcattaagtccgctaattcatcaataaccacatagaccgccccgccgctatagttcttttcgtggcggctctgcatagccttgtagcggcgttctgtggtatctatggcatattgtaacgcttgcaccatgtcccccggttcactggcatatttgagcgtatgcggtaggtgtttatagtctacaagttcaacccgtttcgggtctataaagataaattgcacggcggcggagctgtcttttaatgcggttgtaattatgccatttataacaacgcttttaccgctgcccgttgcccccgctacaagcaaatgcggctgttttagcatatcggaaaatagattataataactgccctgcggcgtttcccaggtctttctaaacaatgttttatacctccttatataagaataccccgcacggcggcggggcttcttttatgcttctttcttccagtatgcgggatacctgcccgtttcgttggtacagttgtaatacatgaacgcattaaccacggtttcaaattcacggttgcgggctattgtagtgttgaacccgtccccgctaacttgcgtgtacttttcccgttgtgcgtctgagtagcaaccccacggggaaaccggggacagcttgcaagctgtcaagcggatgacttcacccgcattatagcggcgggcggcttccttcttactaatgcggatataaccgcctatttgtattttattcatggtgcaacctcctatttgtgcaatatgtcaatgttggtgtttctttctgtggtgcaggtttgaaagcctacactttccagacccccggcagagccgggacgcttgcgccctaactggctatttatacacggcgcaacgtgttaaaagtaaataaatgcggcggtactgcgggcagtgattgcgtataatgtcccggtttcctgtccctgtaataatccgccgtttatgccatatatcccggaactataacccagtttgtaaaggtctttttctttttcgattaaggctttatattctgtgattccgtggtttgtaatgtccacggctgcgcccgttcttacaagggctttcaagtctctttgtgtgtactttctcattacttgcacccccttacaagttccctataaataagggctgtcaaaagttgttcggcgttctgctcactgtagcgggctttttcctctgcggtttcttcaaggattgcgcccaggtcatcaactgcgctacggttgtagtaatagcaggtatcaaggattgacggcaaaccctgcgcccagtctgtaaagcgttcctgttcgttcattctgctatatgcaccctctgcgggcttttcgctgttgaatatcttcataataacggcggctgtatccttgaatgtttccggggtttctatactgtaattttcacccgtgaacccctgcataatgtaggcttgcacgttctgccgtgcctgtttgctgttcgtttttaacatggtggttacctcctgcttgtttgtaccctgtcgggctatcaagttttatcttgatacaagtatatcaagatatatctttattgtcaagatatttcttgaaattctttcaaactttttcaccacgtcccgccgctctgcctgtggtgcaggctgtcccggtcatcctgcggacagacccccggcgggggatatagacccccggcaaccggggcgggtgagcctggaaaatcccgcaaaaataaaaaagattcaagatataacttgacaagatagaactttaatgctatccttatcttgaacaggaggaaaacgtatgacttcaaaagaactgattaagactctgatgacagagcatgatataacgaatgctgagatggcaaagaccttgggtattacgcaggcggctctctgggatagactgaacccgaagaagagcgataacactacagttgcaaaactgggtgatatgttgagcgttatgggatataaaatcgtggttgttcccgatgaaacacctacccccgaagggggatatgaggttggtcagacagacatggtagggtaaaatcgaatttttcactaagtttttatagtaaggactctactaagaaaacttatacagattttccgatttaccctaccacgctgagagaaaggatggtgaaaccatgttctatattttgttctgctgcctgtggttcctatggtggtgtattaaatcattcttctggatttgtgcatgggtcacctggaatatcgtagtcagacctgtggcatggtgcttgtgcctgcccttcaagttaatatgtagccgtaagtgagttacggttttgtccaatgggactgtcttaattgacggttccattttttttttgtttacggaggtatgtatggattatagtaagatgaaaagtagcattgaccgggctatcttaaagagtccgcttgatgttgcagcctatgatgataagttcgccctgtgccgtgactatgagggtacagagttccgactggctcacgaatggaaccaggctttgcaggaggaaatcagagcgggactgaaactggcagtagataccagggattttaagacggcagaggaatttgacaatctgctgtttcgttccttgctgttttgtgcgccccattattttgacgcatacttacaggcggtggagtacggtaagccacttgataagaagttctacctgccccgccgtcattaccttagacgatatgtggaaggataccaggaagttcttgagggaaaactggactttctgtccatttccatgccgaaacgatgtggtaagtctcagcttggtattaactttacgaatatgctttctggtaaatttccagaccgctctacactgatggagggtacaggcgatgaccttgttcagtctttctacaaaggttgccttgagtacattcagcagccgaacgattatcatttttatgatattttcccagagagcaaactggtacaaaccaatgctgatacgaaggtcatcaaccttctgcacaagtcccgattccctacggtcatgtgccgttctattgacgcacggcaggtaggtctttcggaagcaaccaaccttctttaccttgatgactgcgtagagggacgtgaggaagcgaagaacagacagcggcttgatgacaagtgggaggttatttcgggtgatattatcggacgtgccattgagggtacgcctatcgttatttgtggtacacgatattctctgtatgaccctatcggtcacttgcaggaggaaatgcggaagcagggtaagcggtgcaagattattgaaaccccggctcttgacccagtgacagatgagagtaactttgaatacattcgtgagggcaggaaggttttcaccacgcagtacttccgtgaccagagagaaatgctttcggcagaacagtttgaatctgagtttcagcagcagccgtttgaagcgaagggcattctttttccggaagcgtccttgaaccgatactttgaactccctgtagaccgtgagccagacagtatcattgccgtttgtgatacagcagacaagggtgctgactattgctctatgccgattgctgcggtgtacggagatgaggtctacattgtggatgtagtgttcgatgactccccgccagaggttacgaagccagagtgtgcaaaggctctgatggacaatcttgtggtggcaggaacctttgagtcgaataatgcaggtacatattttgccagggatgtacaacagattttgactgaccgaaagtatgtctgcaatatccgaacgaagaggactatcagcaataagcagacccgtatcgagttcgcttctgataacattatcaaacacttttacttcaaagacccgtcactctatgcacggaacagtcagtatgccatgtttatgaagcaggtcacaacctacacccggtctggtaaagtgccgcacgatgacgcaccagactctctttctttgcttgagaatgaactgcgtggactggtgggtgcaaaggtggaggtattcaagcgtccatgttaaatttactcaaaaactcttcaatggttatactcaagaaattacttgaaataagcattgaagagtgctataattacaatagaaatataggataggaggtggcttgtgtgtctttcggtctatatggtagacgaatgattaagtccgatgaaaccgaagtgaccattgagaatgtagttgctattcttaacaaggcacttccttatcattgggagaaccgcagtgaaattcagtatctctggtattactaccggggattgcagcctattctcaatcgtgagaagcaggttcgtccagagatttgtaacaaaatcgtagagaaccgggcaaatgaaatcgtgtccttcaagtcgggatatttgatgggcgaaccactacagtatgtatcccgtggtaacgctgagaatattgcagacgcaatcaatcagcttaacgaatttgtttttgccgaagagaaacctgcaaaggataaggaactggcagactggtttcatatctgcggtacgtccttccgcatggtacttcccaatgaagcagtcggtgaggatgatgactccccgtttgaaatctatacccttgacccccgtaatactttcgtagtgtataacaacggtctgggcaataagccgctgcttggtgtcaagtatgtggtggatgataacggactggttcactacagttgttactctgaccatgagtattttgagattgttgagtcccagattattaaggtagagccgcatattctgggtgacattcccattatcgaatacccgttgaaccttgcccgtattggtgcgtttgagttggttattcccctgcttgacgcaatcaacctcacggacagcaaccgccaggatggtgttgaacagttcatccaggcactcatgctttttcataatgtggatatttcgtccgatgattatgacaagctgcgtgaggaaggggctattaagttccgggatattgacccgcagttaaaggcagaggtcagttatctgaccagtacgctgaaccagggagaaacacaaaccctggttgaccatatgtaccaaacggtattgacaatctgtggtatgccgaaccgcaacggcggttcttccacaagtgataccgggtctgcggttattatgcgtgacggttggtctgctgccgaagccagggcaaaagacagcgaattgatgttcaagaagagtgagaggactttccttaagctgattttgaatatctgcaaaactctgaaaggcatggacttgaaggtttgcaatatcgaaattcgcttcaccagacgtaactatgaaaacattctgcaaaaagcccaggtgcttgacctcatgttgaagaacacgaaaattcacccacggcttgcctttgagcattgcggactgttcgttgactctgacctcgcatacacattaagtgctgaatatgcagaggaacaggagcgcaaagcacaagagttgcttgaaaagcagaatgaagtgaaggagggaaattctgatgaccccggtaataacgcaggaaatggtgcagcagatggaaaatctgctcaagcacgggagcagagtggaagtactgattgagcagggtaagattaccattgttgaaatcaagcgaaaaatgagaatgaaagagtaagccgggacaaaggttctggttagtccgatgggactgtgagtgataaactcatagtccctttttattttgcttatgaatgacaaaactttttcggcgtatgtgactacgcttgatgaactcaatgtgctgacttccacaagctactataccgcttctggtaaagacatgacttcaaaggtaacccagattgcggatgatttattgtccttgcttatcaaggcgtatcagcaagggattgtggctacagcggatatgcttgcctataaccttacggttgatacggactccatgtatgacgcaatcttcatggtgattgatggcaagacctttgaggacagggttgcagaccatgtgacagcaggagatttggcagggttgcagaccttggctgagtcggaatatcacagggtattcaatgcagccgaagaggacggggcttatgtgttccagtctgaaagaggactgggcgtatctaagaagtgggttaccgtccgtgatgaaaaagtccgggatacacacaagtaccttgagggtatgagcgtggcactggatgaagagttctacacctttgatggtgaccatgcggcaagaccgggcggtttcacaaaggctgagaacaatgtgaattgccgctgtgtgctgcaatttgaaacagataccgcgcaggactgacctgtggatatggttagggaaaacctaaatcgcaaactcagacaagaggataaaacggaaaacagtgtggagtgaaccaccgattaaacgcaaggaggacttttattatgagttatttaagtgatttgcttggagaagcctacaaggaaggtatgactgaggaagagatttctactgcattgcagaccgcaggagcgggtcagagcaatacggctgaacttgataagctgaaagcacagctttccaaagcgaactccgaagccgctgactacaagaagcagcttagaggtaagcagactgcggatgaagccgctgccgctgaacagaaagccgctatggacaagctgacccaggaaaatgccgacctcaagcgttctttcgctctttctgataagaaagcgaaactgattgctatgggttacgatgaaaaacttgctgacagcactgctgttgcaatggttgacggtgatatggataccgtgatggcgaaccaggctaagttcaatgagtcccgtgagaaagcaatccaggctgaactgatgaagaaaacccccagacctgctgcgggttccgaaggtacgggtggcatggattacgcaaagaaaatcgaagaagcccaggcaagcggcaatcttaccgcagttgcctactatacacgtctgaaagcgcaggacgaagccaatcagatgaaagaataattttggaggtaaaagacaatggcagatacgtttgcaaccagttttgaagtactgaattacagcggtatgctcttcaacaagggcaatacccgaacccctcttagttccattatcggttctaaggcaaagactaccaatcacgttgagtttgtgaccgggcaggaatacactgcgggcggcgcaggttctcagcctgcaatcagtgagaacgcttctctgactgccccggacgctactgttgtgaagcgtgagcagaaaaccaatgtgactcagattttccaggagtccgtgggtatctcttacggtaagcagagcaacatgggtactctgagcggtatcaatgtggcacagcagcagggcaatcctgtcagtgaactggatttccaggttgcagcaaaaatccagaaggtcaaccgtgatattgagtacacctttatcaacggtgtctacaacaaggcaactactgatgatgaagtgaacaagacccgtggtctggtaaacgctatcagttccaacactatggcaatggctaagaagcccctgggtctgtgggacattgctgacatggttaagaagatttatggagcaaatgccccgactgacggtctggtgctgtggtgtgacgctgtgactctgttccaggtcaacgcagacgcagttcagaacggtcttaccgttgtacccgctgcccgtgagattaacggtatcgctctttccagtgtggtgactcctatcggtgttgtttacctgtatctgggtgagtgcctgcctgcgggtactgcaatgcttctgaacctggacgtgcttgcacccgtatatcagcctgttccgggcaagggcaacttcttcctggagccgcttgcaaagactggcgcaggtgagaagtatcagttgttcggtcagattggtcttgaccacggtcccgaatggtatcacggcaagttcactggtatctctactacctttgagaagcctgcttacagccgttctgtttatgtggcaaatgccgcagacattggcaagactactggctaagttgagaaaggagggtggacaagatgaccgatgaagagaaactgacaatgctgaaacgcatgacagaggaaacggatgacgaagtgttgtccacctatcttattctggcgaagggtgtagtgcttgccagggcatacccgtatagcgaagcagatacggttcctgcaaaatatgacacggttcatgttgagattgccgcttatatgctgaataagcgtggggcagagggtgaaacagcacatagcgaaaacggcgtttcccgttcttatgaagatggtgacattccccctaccctgctgcggcgaatccttcctatggcgggggtgattctatgaagctgatgaagcgcaatctcaagcccgtgcattactgcctgtacaaaggtagggagccgcttctggatgatgacgggaatgaaactggtgaataccaggtgggctatgaaagccctgttgaactgcaatgcagtgtttcacctgcgactggatatgcccaggtgaatatgtttggtaacttagagtcctatgacaaggtactcattactgatgatacaaattgccccattgatgaaaacaccctgctctttgtggataaggagccagagttcggaaatgacggcaatcctctctgtgactatagggtacggcgtgttgcaaagtccctcaacagtatctcttatgctattagcaaggtgaccgtatcgtgagcaagcgtgttatcaaagttacgttatctgaaaagagcattgacaatgccattaaagaactcaagaactacaagacgtggttgaaagagtgtactgaaaaattcatacaagcccttggtgaagaaggagtccaggtggctacagcaaagttccagacagccgtctatgacggtacgaatgatgtgagcgtgtctgtagagagccgggataacaacaaagtagccgtggtagctgtaggaagttcagtcctctttattgagtttggcacaggtgtcaagtacccagacaatcacccggaagcaggcaagaacggtttcacccgtggtggctacggttataaactgggacggcttgaaaggggatggcgatatacgggtgaccctggttctaacggtgaagttattaccactggaaaacacgcaggtgaagttcatacctacggtaaccctgcaaacatgagtatgtacgaaacagtcagagagttggaagagaaatttgcagagatagcaaggaggtgttacacatgattgactgcgaaaacgaagtctatacaaggcttgcgaaaatcttgagagagaaattccctaagattgatattgccagtgaatatgtgaaatcaccttcttcttttcctcatgtgagtattacccagagtgactgctatatccctacggagtggcaggacagcagcatgaaagagaatatggtcattgccatgtttgaaatcaatgtctactccaataaggcagagggtaagaaaacagaatgcaagaagattatcaaagaaatcaatgacgtattgtactccatgaattttaggcgcacggctatgaccccggttccgaacatggaggacgcaacaatctatcggattacagcccgattccgtgtggcaaccgatggaaaacacttttacaggaggtaagtgaaatggctacaagtacttatatgactttcctcatgcacaagaaggaaacggcatgggagaagctgcttgacattactgagttccccgacctgggcggtgacccggaactgcttgaaaccaccactctgtctgacaaaatgcagacctatgtgaatggtgtccagagcaatgacggcatgacctttaatgccaactatgaccacactgagtataaggctctgaaagcccttgagggtaagaacgaggaatacgcagtatggttcggtggcactgagactgcaagttccccgactcctacgggttctgagggcaagttcaagtttgcaggcgaactgtccgtctacgttactggcggcggcgtgaatgaggttcgtggtatggcgattacgattgccccgtccactcctatcactgagggcgaagagtaagattacatttaattttgagaattaaaggagagttgagcaatggctaaacagattgtttttacctatgaagataaggaatacacgcttgagtttaccaggcgtaccgtcaagcagatggaggatgagggctttgtcgcacaggacattgaccgtaagcctatgactctgcttcctgctctttttgcaggtgcattcaaggcgcaccatcgtttcgtgaagcaggatgtgattgacaagatttatgcgggtatgccccataaggatgaactgattggtaagttggcagagatgtacaatgacccgattgtgactctgatggaggaacccgatgagaaagcggtaaaaaacgtgagttgggaagcgaactggtaacgggttcggactcccaggctgcaacgggcggcggcaaccgccgcttgcccgttgtttatcgttacggggaaacttttgaaaaactctgcggttattacatgagtctgggtatgggctatcacgattactgggatggtgattgtgagatggcacggtactacagggatatggatgaaaaggtcaaagagcggcaaaatgaagcactctggttgcaaggtctgtatttctatgaagcgttggttgacgcttccccggtactgaacgctatgagcaaaaagcacaagcctattccttacaggcaggctccaattcctctcaccgaagcacgtcatagacagcagcaagaggaagagaatcacaagaagctgaatgcaggtaaggaagccatgaagcaaataatggcaggggttaattcaaaattcaaacggaaggaggaataaatcatggcagttgagattgaaggtcttgagtttcaaattgaagcgaagtccgaaaatgccgctaaaggtgtagacgctctgattaacagcttcaataagctgaaagcagcaaccaaaggcggtgcaggtctgaacaatatcaacaagaaactggacgcaatcagcaatgcgaagctgagtatgtccgggattgagaagattgaagatttgacgaaaagccttaactctctgagtaatgtcaagatttcctccacaatctctaagagaataactgaaatcagtgcttctctggatagtctggactggtctggtgtggaaaaggttgaagcactcagcactgctctacagaatatgcagggcattcagattccgaatatgagaaatattactgggaaccagacggctacacctactgggactgcggctcctgctgaccctgcgggtgctacaagcgcaggtgcggcggctacagcggcaacctctggtattacccagtatatttcccggataaccgctgccgctacgcagaccaggggattccttggtgttctgcaaggtgtaggcggtgtgttctcaagagcattttctgctgtaggtggtgttgctctgaaagcatttcaagccgccttgaagggagtaagcactgcggcaaaatcagcagtgaatgcctgtaagacactgggaagcactatcggctccaaactaagtagcaaggtaaagcaaacaacttcgggcatgggtcagttgttttcttccttaaagcgtattgcaatgtaccgtgcaattcgattcttctttgcacagcttacggctgcaatgaaggaaggtattcagaatttgtatatgtacagttccctcatgggcggtacgttcaagggaagtatggacagtctggcaaccagtttccagtacctcaagaacagtatgggtgctatggtggctccgctcatcaatatgattgctcctgcggtggacgctctgattgataagtttgcagcactgctgaatatcgtcaatcagtttttcgcccgtctgtctggtgcaaccaccttcacgaaggcgaagaaagcggcagcttcctatggcgattctatttctggtgcgggtaagtctgcgaagaaagcagcgaaggatattaaggacgctacggttggcattgatgaactgaacattatcagtaagaacgattccaatagcggaagcggctctggtggtaagaactacggtgatatgtttgaaaccgtgccgattgacagtagcatttccaaatttaccgataagctgaaagcggcactggacgcaggtgactggaagagtctgggtactctactgggcgaaaagttcaatgagattgtggatagcattgattggtctggcattggtcataagattggctacggactgaacggtacaatacagacagcatactggttcttaaagacagcggacttcaagaacctgggtaaccatatagcagaactgctgaatggtgcaatggaggaaatcgacttcacataccttggcagacttctggtgcgtggtatcacggtagcccttgattttatgattggtttgcttggcggtttgaattggagccttgtgggaaagagcattggcgatttcttgaagggtgcattcaatgaagcccaggagtggattgcaagctataactggaacaagatgggcaaagacctgtggaagaatctcaaggcttgtattaagggcattgactttgcaggtgtggcacagagtttctttaagttacttggttcggctctggcggctgcggttagctttatcgcaggtttcgtgcagggtatctgggaggacattaccgggtatttccagaaatatcttaccaatgatgacggcacgaagaagtgcggtcttgactgggtagcgggtctgcttgagggtatctgggacggcattaagaatatcggcaagtggattaaggagaacgtatttgacccgttcattgacggattcaaagagtgcttcggtattcactctccttctacagtaatgaaggagatgggcggttatgttgtcgaaggtttcttacagggacttaataagttcagtgagattgcaggcaaggttaaggaatgggcaggcaaggtcattgagtggttcacgaagggcgaggacggcaagggtattgttgagcatttcaaggaaattggcggcaatatcgtaagcagcttcaaagacaaggttggtggtacttataccacggttaagtctaacgtgaccacctgggcaggcaaagtgaaagactggttcagcaacaactcttttggtggagtgaacagcgatactttcagtacttttgcgaacaacacgattgaaggtttccgaaccaaagtcggtagtgcctataccaataccaaagcgaacgtgaccacctgggcaagtaaggttaaagaatggttcaccaatagttctttcggtggcgtaaactctacgaacttccagacgtttgccgggaatgtcattgagggcttccgtacaaaggtaggttctacctataccactacgaagtccaacatggttacctgggctacgaacgtgaaggagtggtttacgaacagcggcttcggcggtgtgaattctacaaacttccagacctttgcgaataatgtggtgaccgggttcaaggataagattggttctgcgtatgtgaatacgaagagcaatatgaccacatgggcaagcaatgtgaagaactggttctctggtattgcttccgcttctgcattctctggcttcgcaaccagtgtggttgatggattcaagaacagaatcggtgggtactacactgcggcacagggtaacatgagtaccttcggtagcagcgtgaagagttggttcacagcatattgctcctacaacggtttctacaatgtagcttctaatgtagtgagtggttttaagaacggtatcggtgaattgtaccatacttgcaaaagcacaatctcttcctggggcagttcaatcatttcctggttcaaggataagttggacgtaaactccccgtctaaggtcttttatgagattggcggttttgccgttgcaggtttcaacaatgcgattgcccaggtgggtaagagtacgaagtctgtagtcggcacatgggctgattccttcacgaatttcagtccgacaatggcactggcagttgatacttctgctctgaaatattatgactctgccgcattctcccggtctatttcttctaacgtacagagcagcacggagatttccgcaacgggcttccgtgaagccatggaagatttctaccatgagtacgttgaaccgaccatggttcagatggctgatgatatgcgtaggcaggctgataagaaagagaaaaccgtggtgcaggttggtaaccgtgtggtgactgacgctgtgaccactcagaagaaagccaatggctatagctttacgggataaggaggtaatgtgtaatggcttatctggcaatcaacggttatgcgttacctccctgcaagagaggtgtcacccctacggtgaccactcttgtagattccgggcgtaacgcaaacggtacggtggtgggtcagcgtatcggacgtgaccaatacaagattgacaatctggaatggtcatggctcactgccgaacagtggtcaaagatactgagtatccttgataacttctttgtaaatgtaacttttattgaccctgtaagcaatgcacctaagaccatcaaaatgtactgcggtaaccgaacggctgaaccctactgggtggatgaggacggtcacccgacacactacaggaattgcaaggtgaatctgattgacgtaggagagtgattttatgcaaaaggtatccaaagagtataaggcaagcatgaaagactccctccgtgagagagcatacataatgatttctttcggagttgtcaaccaggaagcgcaggcgaaagccagagtagacagcggagagtttgcctacttctctaacccggacaacctgtttaatgagggaactgacgatgtggtatatgccactctggaagagaactttaccagggttgacggttctatgtattttctcccacggaacaagccgggagcaatgttctacaacacagggttggtaggaaagaatctggtatcagacggactgtatgaagtgaccataaatcttcatgcggctccgactgatttcagaggtatcacgattaacttcggtgagaattatcctactgatttcgattttgtcactaataccgggcaaaaggttgagttccgggataatgacaaagctgtttttactacagaggaagtgcttgagaatgtaaccacactgactctggtgattcataaaatgaagaacttccgaagcaggttgcgtatttactccttccgtttcggttacggactggtgtactacaacgattctgttatgagttcttcacttgagagttatgtcagtccgattggtgctgacattcctcagattgatttctcagtaacgctgaaaaactatgacaagtatttcaacgtggacaacccgaagtcggctatcaacttcctggaaacgggacaggagatggacatttactacgggtatcagcttccgaactctgatgaaatcgaatgggtcagaggaaatcacctgctctgttctgagtgggagtccgatgactacacggcaacaatccgttgccaggacgtgttccgtaacatggatacggagtattacaaaggattgtatgctccgaacggcaaaagctattatgacctggcgattgaggttctgaaagctgccggggagaaagactactatgttgacccccgactcaaaaagctgtatacgaagaaccccatcccccgtgtttcttgtaaggaagcattgcagattatagccaatgcctgccgctgtgttctgtcacagtccagagtcggtacgattcagattaaatcatctttcgtcccggaagctgcggcaagcagtaatggtgaaaccgattactcccacgttgcgaagattctgacggatgacaccaaagatgagtatgcaacactggcaagtaactacaccacggcagatgggacaatgttcttcctgccacgggcggcaagtaagaggacgctgaacacaggttttatctcagaacagcagtctgacgctgacggtaagtttaccacaaaccctatggtaactatcgtgcaggaagccgcctgtatgtactacggtgtgaagttcgtgttcggtaatgcccttccttcgggaatggtcattcgtacctacaacaataacgaactggttactgagtatgaggtggaagaagagattacaaagactctggtgattcttcgggactttgatgatttcgacaccatgaagattgagttcacgggaacggcagagccgtacaaccgtattgtgcttaacaacttcgctttcggtgatgtgactgacttcactatggagcggcaggacatgacttcttccccgaaagccattaagcaggagttggtcaaagaggtcatcgtaccttgctacagttatcagccgggtaatgccgaagagagtcttgtcagtgaggatattaccgtgaagtcgggtgatgtggaaaccttttatgtgggtgaaccgtcctacaacttccgggcaacactggacgaaagtgccagtggtgtgagtatcactgcatggggtaactactatgtgacagtcaagttctctaagacaggaaccttccgtctggaaattctgggctatcggtacaaaatcgtggagcgatatgccacgaagtcactgaacagcagaggtaagtctgtaaaatgggcgaacccgcttatcagtgatatggcgattgctacggaactggctgaatggattggtgactattataccgcaggtattgagtatgagtacgataccagaggtaacccggaaattgacgcaaacgatattgtgtaccaggagaatgagttccatgacggaatgaaggtaaatatctatcggcacacaatcaactttgaccaggcgttcagcggcaaggtaaccgcaagacgtgtgtccagttaggaggtgacggaagatggcatggcaaacacctaaaacagattggcacggaagtacaaattcagaaggtgtttacacgggtgacagattcaatgcttcggatttcaaccgtatcaagaacaatctgacgttcctccgggatatggcaatcaagctgtacaaggagttctcccttgtaagcctgggtgatgacagagtaccaggtgattacttttacgctgatgaaatcaatcagcttgaagaaaatctggaaaccctcaatgccaacactctcagaatgtcttacgggtctgcacccgtttataacgataacggcactacgatggatttcaatgaactgaatcgtttggagggtgcaaccttagacctgtatgacagactcacgaatgagagtgaaggaaggaggatgtttacatggaatttcggaatgaagggaggggacttgtaaatggcatggaaacttttacctgttgactatacggacgctgtgtgggcgggtttgaagagatacaaccagattaacaatgaggatggttcggtatccttccaggacattacggcttataccgggaaagagaaatctttcttcggggcaaaagacgctaaccgcatgaacgaagccctcaacaccattatgagcatggttgagaatggcactgacctgtataccgcattccagaattattttgcagagcagaaaactttgtttgagcaggaagctgattccaaagcaacggagtttgataactatacggataatctggaacaggaatacaaggcaagtatggcggcttttgagagtcagcagcagcaaatttacaatgcctggttccaggctatgaaagaccagttgagtaaggacgctgcgggcaacctgcaaaatcagtgtactgaactggatgagcgtttgactctgcttgagcagatgacaatgcagaatgacttctctgctccgcttgctacagatgatgaagcaatcactctgattgtggatgacctggactatgcgattctggcagattggaaatacaaggaggaataaaagatggcaactattagtgttcagacgaaaaagtttgcagacctggaagcgattctgtccgttacgggtactgagcagatgttgattcacgatggtaacggcgtaaaggtcattaccgtgaagaatcttcataagggtttgcagactgacattgattcagtcagaaatgtactggctgatggtgcaggcgcacataacagtatctatcgtggtaagaacctgggtacttctgttacggcagaacagtacaaggcgatttccgatggtacgtttgcaggtctgtatgttggtgactactgggttatcagcggagtgacttaccgtattgcaggctttgactattacctgcataacggcgataccgatactacgaagcaccatgtggtgattgtacccgatgagaacatgggttctgctcagatgaataccaccaatgtcactacgggcggttatgtcggttcggctatgtacaaggcaaatctgaatgcggctaagactaaaatcaagtctgcgttcagaggtcatgttcttagtcatcgtgtttatctgacgaatgctgtatctaacggcgcaccttctggcggcgcatggtttgatagcgaagttgaacttatgacagaacgcatggtttatggctgtcctgttcattctcctatgggtgacggtcagaaagacccgtggagcgcaatgcacaattataccgtggaaaaatctcagcttccattgttcgccctcaacccggctgcgattgctacacgatatgattactggctgagagatgtggtcaccgccgctgccttcgctcttgtggccggctccgggtctgcgggccatggcggcgcttctggctctcgtggcgttcgccccgctttctgtatctgttaatcgaaaatctgcacccccttgtggggtgcagtagaaaggaactaatgaaatgtcagtattgaaaagcaaacggaaaccctctcagtttgaggtgttccatcatctcaacaaagttaggaaagaggttactgatttgctgctccgtgacttcggctacagcaaacgaaaggcagcacaacgccttgagaagaaattcagtgggcgaagctacgaagaacttactgacgttgagaaagagatttatgaccatttccgcaaacagcaggaagcctttgacacctggtttattgaggatgagcggaaagctgtagtcgattgtctgaggtctatcggtgaacacgtctacactgcgaacagtatttatcccacctattatgaagagttggtggagcggcgtgttcatcaagacctggcaatcggtcagtgttaccgactggtacaggaactacagtatgcaatagaaactctcccagtggatgtcaattctttcttgaggttcggtgaggatattcaaagagaaatagaccttatcaaaggttggcgtaaatctgataacaagttcaaaggggcaatctctgcaaccgccgctaacttcgctaatgtgaacaacaacgggaatgcgaacaataacaacgcttctaactctaatggcgttcgccccgatttcgatactccgattaaatagccacttgagcgtttcggagtaagagaaaggagagattgtccttcctatgatggtaaataccaaacacgatactacttcttacgagaattgtagttgtcaacgtgaaatatatgacggcaatgcgttgtatgacgcttatcttagagcaaagagtgggagtgattggaaaccgcaggttcagcggtatgaaatggcataccttctggacttgtccaaaatgcaaagagagttgaaagaacatacctacgaatttcaaccctgtagcagtttccctcttaatgaacggggtaagacccgctttattacgggcgaacagatacgggatagaattgccaaacattctttatgtgatgaagtcttgactcccgcaattaaagaccacctcatctacgataatggcgcaagccagaaaggtaaaggaattgactttacccgccgcaggttggaagcgcacctgcacaggttcttccgggagaatcagagcaacaatggttatatcttgctgatggatttctcaaagtactatgacaacattcgacatgacaaactcatggagttgtttgaaaagtacgtggatgacgatacagcactctggttcctggaaaagattgtagacaatgagaaggtggatgtgtcctacatgagtgatgaagaatatgagtccgctatggacgatgtattcaattcactggaacacgaaaaggttgataagagcctgctgaccgggaagaagttcttgcgaaaacacttgaacataggtgaccaggtagcacaggacgcagggattgcttatcccataccgattgacaactacataaagattgtaaaaggcgtgaaattttatggcagatatatggatgacagttatgtgattcacaaagataaggagtttctgaaagggctgcttacagagattgtggaaatcgcacaagacctgggtattaccgtgaacattcggaaaaccagaatatgcaaactgtctgaaatgtggaggtttctacagattcagtattcgcttaccgataccgggcgggtgattcacaagattcatccgaagcggcttacaggtatgagaagaaaggctaagaaactggtactcattctctcagaaaaggatttcgatgactggtttaggtcatggttcaatggtcactgccactacatgagcaagctacagaggtcaaatatgttagacctttgcaagaaattaaaggaggaacactactatggtaaaactgattttagctgacggcacggaactcaagggcttcaagcagaacggtaacaactacgtcagtcagactgaggttgatgtgtccgtatttgaggacaatctgtccactcttacgattgtggacggtgacactcagatggtcatgcacaacgctgaactgattcagcaggttcagtatgctgatggctggtatctctgcttccgtgaaaagactgagcaggaaatgcgctatgccgaactcacgggcaaacttgagtacatggcaatgatgactggcgtggatatggaggtgtaaatcatggcacatagcaagaattatgagaaggtaaagaagttctacaagatgggcatttggtctgaaaagatggcgtggaacgcagtaggaaagtggattaccccggatgagtacaaggaaatcaccgggaaggattacagcaaggagggctaagattatgaaagaatggatttgtactgcaatcggagtagtgggtagcttcattgcttccctgtttggcggttgggacgctgctctggcaaccctggttatcttcatggcgattgactatgttacaggtctgattgtcgcaggcgtgttccataacagcggcaagactgagaatggtgcgcttgagagccgtgcaggttggaaggggctgtgccgtaagggtgtttcccttctggtggttctggttgcctgccgcctggatttaattactggcactaattttattcgtgacgctgtggttattgcattcgtggcaaacgaaactatctccatcgtggagaacgcaggacttatgggtatcaatattccccctgccattactgcggcgattgaagtactcaagaagaaatccgacacggacggtacaaattaagagcgggagagggttcgccctctcccagaagggaggtgcaacatgacaagaggtactacacctacaatcactctcacattgaatgaggtggatttgacttcactgaaatctgtatatgttacgttttgtcagtctggaaaaatgcttacaaagcagagcggaactgagggtgtagagattgccgaacatactgtgtctgtatctctttctcaagaagaaactttacgatttaccccaggaacggtagaagtccagttgagaggtttaaccaatggtggggacgcttttgctacaaacgtggcaagggttgcagtaaaggaggttcttctgaaagaggtgattacatgattgtgatggagaatatgactctttccgttgaaccttccgatacgcttctgacttctgtagatgactctgctacagagttatctatggaagcagaggacgtaacaaagattccagagagcatggattacgaagatttgaagaacaagccctcactgaacggcaagacaatctctggaaatatgacagagatagaccctactgtgggtgactgggcgaaggaacctacccgtcctgtatataatgccgcagatgtgggtgcggttggaaaggacgaactgacagacattcctacagatgtattagaacagatgtggaactcaatttaaggaggaaatgacgatggcttttgaacatttgggtagaacgggtacgttatggttgatgaacaaaatcaaaagtgttctggcaactaaggtagataaggtagaaggtaaggggctgtctacgaacgattttacgactgccttgaaaacttcttacgactccgctgttactgacgttgccgccctcaagaaacagggggggggagccgaacaaaatcaataccgtcagtgtcaacggtactgctttaaccccggactccaataagaaggtagatattactgtaccgactacagcaacaatcaagactcagattgaagcatataagtatcagacttccgcacaggtacaaactgcaatcacttctgccctttctggtgtgaccagtatcgacttgcaggttgtaacttctctgcctgctacgggtaagaagggagttatctacctggttgctcatactcatacggatacaggcgatatttacgatgaatttgtatgggtagagagtaagaagtcctatgagaaaatcggtaatacagacgtagacctctctgcgtatgtgaagtctgtggatattacagatatttctgaaactgatttggcaaccatgtggaactcataaagaaggaggtgtgggcttatggcacacttcgctctgacaaagaaagcagttcaatggcttgtcgataaagtgaaagataacacaaaacgctgtgatgaatatgctattcgcctggactctgtagaagaaatgattataaaaaatcagttctcagcccctatcgcaatggatgacgggaaactactggttacagacgatggctattccattctggcagattggaaatacaaggaggtatgagatgaccaaccgagagttcattgaaaagattgccgggtatgttctaaagtatgcaacttcctacggggtatgcgtacatagtccgattatcgcccaggcaattcttgaaagtaacaaaggcacgtctgaactggcagtcaatgctcataactactttggcttgaagtatcgcaaaggacgctgcaagacctgcgtgggtgtttaccacaaagtaggcagtgagcagaacccagacggaagctataccagttccgctatggaatggtgtaagtttgggagcatggaagaaggtgtcatcgggtatttcgatttcaccaacatttctgcttattccaatttgaagggtgtgactgaccccagacagtaccttgagaatatcaaagctgacgggtatgcaacctctctgaaatatgtggacaaccttatggctgtcattgagaggtatgaccttacccgatatgacaaggaggaaatgaaaatgagtaacagttctctggtgtcctacacccaaatctcacctaacaaaaacagtccccgcaatcatgcgattgaccgtattaccccgcactgtgtagttggtcagctttctgcggagagtatctgcggttgcttcaccagtccttcccggcaggcaagttgcaactacggtatcggttatgacggcagaatctctctctgtgtagaagagaaagaccgctcctggtgttcttccagttctgcgaatgaccatcgtgccgttaccatcgaatgtgcgtccgacaagactcatccttacgctatgacgaacgctgtgtacgcttccctcatcaacctctgcgtggacatttgcaagcgcaacggcaaaaagaagctgctctggttcggtgacaagaacaagactctggcgtacagtccgaagtctgatgaaatgattctgacggtacatagatggtttgcaaataagtcttgccccggtgattggctctattcccgtatgggtgacctggcggcaaaggttactgcccgtctgggtggcagcactgccgaagagaagcctgcaagcaccaccacactgtaccgtgtccgtaagacctggaatgatagtgcttctcagaagggtgcattctcttctctggcgaatgcgaaagcctgtgcagacaagaaccccggctacaaggtgtttgacggttcgggtaatgctgtgtaccatgcggagagcaagcctacgttctctccatatagagtgaaggttacagcttcggttctgaatatccgtaagggtgcaggtacgaactacgctctggcaggcactatccgtgacggtggagtttataccatcgtgcaggaaagcactgggcagggtgcaacaaagtggggtaagctgaaatctggcgcagggtggatttccctggactacaccacgaaggtgtcataatcccagaatcgcttccgggaatgggacttcaatctacaatggaacgtgtgaattagcaggtttcctgtgattgttggatttgcactcatacctggaggacagcggatacatggcgcgcgtggcgtttgtgatggataagttattgcgcaaaatcggactttccggccgcagtgtggtgccgatgctcatcggcttcggctgcaccgttccgggcgtgatggcgagccgcacgctgccttccgagcgcgaccgtaaaatgacgattctgctcacgccgtttatgagttgctccgcaaagctgccgatttacagcttttttgcggcggcgtttttcccgggcaagggtgcacttgtgatggtcattttgtatttcaccggcattttggtcggtattttgatggctttgctcatgcgcggcacgatgtttaagggtgaggccgtaccgtttgtgatggagctgccgaactaccgcatgccgggcgcgaaaaacgtggcgcagcttttgtgggaaaaggcgaaggactttttacagcgcgcttttacggtcatttttgttgcaaccatcatcatttggttcctgcaaacgtttgacctgcgctttaacatcgtttccgattccaaagacagcattttggcggtcgtcgccgggtggattgcaccgatttttgcgccgctcggctttggcgactggcgtatctctacggcgctcatcacgggctttatggcaaaggaaagcgtggtgtctaccttgacggtgctgttcggctcctccacggcgcttacaacgctgctgacgccgctttccgccgtaagcctgcttgtgttctgcctgctgtacacgccgtgtgtggcggccattgcgtccgtaaagcgcgagcttggcggtaagtgggcggcaggcgtcgtcatcggtcagtgcgtcatcgcgtggctgatggcggggcttgtgtacggcatggggtcgctgtttatatgatggataagctgaacataggcacggttcttgtgttccttttgctcgtcatagcggtgttttttgctgtgcgggcaattcaaaaaggaaagaccggcggctgcggcggggactgcacccactgcgccggctcttgtgcaaagccggaacagaaaaacaaagcataaaaagaacagagcataaaaaatctcctgcttcccgaaagaggcaggagatttcgttatcttaacttattcgtcttcttcggagacgccgtgctcgtgtgcttcgtcggcatccttgatctcgcccacgatgggggtggggtcgatgccgcggcggcggtagtaatcggagaccgcagccttaatggcctgctcggccagaacggagcagtgaatcttgatggccggaagaccgtccagcgcttccatgaccgccttgttcgtcagtttcagagcttccgggatcgtcttgccttttacaagatcggtcgccatgctgcttgtcgcgatggccgcgccgcagccgaaggtcatgaactttacgtccgtgatgacgtcgttatcgaccttgatgtacatgcgcatgatgtcgccgcacttcgggttgccgacttcaccgacaccgtctgcatctttgatttcgccaacgttgtgcgggttggagaagtgttccattacttttgcactgtatgccatatcgtttcatttcctttcgtacattcgtaccggattattttaaaattaagagatcgtgcggccgtggatgatcgcatcccacagcggactcatggcgcgcagacggtcgatgatcttcgggagcacctcgatgatgtaatcggcgtcgctctcgtcgttcacgtcgctgaagctgagacgcagggaaccgtgggcaacctcgtgcttaaggccgatggcaagcagcacatggctcgggtcgagagaaccgctggtgcaggcgctgccggaagaagcgcagacgcccttaaggtcgagcatcagcagcatggattcgccctcaacgccttcgaaggagaagttcacgttgcccggcagacggtggtagcggtcgccgttcaaatgactgcggtcaatctttgaaagctccgtgatgagcttatcctgcatgcggcgcagctttgcgttcttttcgtccatcgtattgatggcgttctcgagcgcaacgctgaggccgacaatgcttgcaacgttttcggtgccggcacggcggccgcgctcctgtgcaccgccatcgatgaggttcggcaggatgatgcccttcttgatatacagcacgccgacgcccttcgggccgtggaacttgtggccgctgagggacagcatgtcaatgttctgctcttttacgttgatcggcacattgccgacagcctgtacggcatcggtatggaaccaaacgccatgctttttgcagatttcaccaatctccgggatgggctggatggtgccgatctcgttattggcatacatgatggtgacaaggccggtcttatcggtgatggcggcctcgagctcttccgggacgacgatgccgttttcatgcacgtcgaggtacgtgacctcaaagccttctttttcgagcgctgcgcaggtgtgcagcaccgcgtggtgctcaaacttgcttgtgatgatgtggtttttgccccttttcagcatcttgtgcgctgcgcccttaatggcccagttgtcgctttcgctgccgcagcttgtgaagtagatctcattcggctctgcaccgagacattttgctacttttgcacgtgcttcctcaagtggcttttttgcagccgtgccgagcgcatacaggcttgacggattgccgtagcattcggtgtagtacggcagcatagcctcaagcaccgcaggggagacggcagtggtagcggcgttgtccgcatagatgatcttcttgccgttgttttccatagctttatcagtacctttcggatagtgttttttgtgagggaacagaaaacgcatttggggtcgatcggtcgggatacgcatattctttcctcagcgagataaatatacaccaaattggtatacttttcaatagggaaattccagaaagtcaaaatttttctgaaaaagcaggaaataaaggccccgaacgagagttttccgtacaaaatggaagaaaacggcggccgttttttgaaaaccggcgtacagaacacaaaaaatcgggagaatatgggaatagaacctctgcggtgtgcccaaactccgtacagagcgaaacggcacgcggcttgacagcacggggagaatagcgtaaaatagaattatctttttgtgtgcgggtatttttcgcatgcgtgaacggctgacactttgcacgtaaacggtacgtgtaacggataatgaaaaaaacgctgcggtgttttgatttacatgtgttgaacggaaaaaacagaagaaagaaaagcagaaagcggcgcggacttgcgtgcgttttattctgctcatgccgaaaggcgacactgcgcagagcatcggttggtgcttttgtataccttattcttgcgtgaattgcgacagtgcgcctgtgttatttgaaaggaaggtcaatttggcagaaaaaagaatcagaaaaatgacgaaattaacgtcgctcggcgacgcgcctgcaaagcagcaggaccagcccctcagcggtgcaggggaaagcttcatcggcaagatttccggccccatcgaaaagccggtgagacgccagaaaacgcgcagaacggaaaacgcgcaggtaaaagcagaagcggcacagcaaaccgtgagcgaaacaaaagagacgaagccgaagcgcacgcgtaccgcgcaaaacacggacgcacacaaaaagacgatgaaaacggtaaaatcggccccaaacggtgaaaaagcacccgctaagacaacaaaaagcacgcagacgaaaaataacaagggcaggggcaggcgcacaaagcagaagccctctgtgcgcgcgtatttcctcggcggcttaaatgagatcggcaagaatttcacgctgtttgagtgcgaaaacgacatggttatcgtggactgcggccttgccttcccggacgaagaaatgcccggcatcgacgcggttattccagatttcacatttgttgagaaaaacaaggatcgcatccgcggtattgtcatcacgcacggtcatgaggaccacatcggttccctgccgtatttgctcaaaaagatcaatgtgccggtgtatggcacggcgctgacggtggcgctgattgcgaacaagctcaaggagcacaacctcggctatgtgaagctgaacgtcacaacggcgggctcgcacattcagctcggctgcttcgacgtggagcttatccatgtaaaccactccatttccgacgctgtgggtcttgcgctgcacacccctgcgggtgtcatcgtccacacgggcgactttaagattgatttcacccccacgcagggcggcatgatcgaccttgcgcgctttgcgcagctcggtcaggagggcgttttgctgctgatggcggactctacgaacgcagagcgccccggctacacacagacggagcaaaaggtgaacgcgacgtttgacgcactctttgcccgcgcggaagcgaacaaaaagcggctcatcatcgcgacgtttgcgtcgaacatcagtcgcgtgcagcagattatcaactgcgcggaaaagtacggaagaaaagtggcgctttccggcagaagcatggtgaacgtcatgtccattgcgagcgagctcggttatctcaaagtgccggacggtctgctcatcgacctcaacatgatctcccgttacacgaaggagcagattgtgctcatcacgacgggcagccaaggcgagccgatgtctgcgcttacccgcatggcgtttgccgaccaccgtcaggtcgcggtcggtgaggacgacatgatcatcatttccgcgcgccccattccgggcaacgaaaagatggtcggcaccgttgtagacgagcttttgaagcgcggctgcgatgtggtgtacgaatccatgtacgaggtgcacgtttccggccacgcgtgtcaggaagagctgaagcttattcaggcgctgacgaagccgaagtacttcatcccggtgcacggcgagcagaagcacctgcgcaagcatgcgggcgtggccgtcagcatgggtatgccgccggagaacattttcatcggcgatgtcggcagcgtggtggagattcatgaagactacatgaagcagctgcccgatgtacaggcgggcgcggttatggtggacggcctcggcgtgggcgacgtcggcagcattgtgctgcgcgacagaaagcaccttgcggaggacggtctcatcattgcggtgtgcacgattgaggcaggctccggcagagttgtttccggtccggatatcgtatcccgcggctttgtgtatgtgcgcgagagcgaggcgctgatggacgaggcgagacggcttgtcaacagcacgattgagcagtgcgcggacgaaaacgtgcgcgagtggagcgccattaagctgcgcgtgcgcgacaacctttccagactgttatataaccgcacaaagcgcagcccgatgatcctgccgatcatcatggaagtttaaattcagtttaagttagattagtttcttgggggttcccctcagaaggagagacgggaaatgaacaagcgacgcatctgggcgacctcgccggtctattatgttatggcagcggtcatgttcattatggcgtgcttcagctatacgcagaataagattctgtttgcggtggagatcacggtttccggcctgtgtttggcggcggtcatcatgaccgacctgcattaccgcgtgcatgtgtacacggcgctcagagctgcgagaaaggtgctttccgccgatgaacagcgcaacctcgggcagtttgcgctgccccttgcagtgctgggcccggcgggcgacatcgtctggacgaacgagcgctttcaggatttattcaccgaaaacggcgaaggctgcggcgataacattgcggcgtacatttacccgaagactttgcgtcagattttatccgaaaacggaacctccgtttcctacggcgaccgcgagtttacggcttacggcctgcgcaccgaaagcggcagcgtgctttattttgtggacgacacgtattataagcagattcagcgcgactaccgcgaaaagcgcacagtcattgcggttatctcgtttgataaccgcgaggagctgacgcgcgatgcctccggcagtgaggattcccgcatcacgtccgaggtggaatccgtcctgcgcagctgggcgatcgacaccatggagggctttctgcgccgcatgacgaacgggcgttatatgctcatcacggacgaccagcacatagaagaagcgaaaacgaagcgctttgccgttttggacagcgtgcgcgccgtgaagggtgagaataacatgtctgccacgatctccatcggcatcggccgcgcgggcgtaacggcgacggaaagcgaactgcatgcccgtcaggcactggaaatggcgctcggccgcggcggcgaccaggtggccatctaccagcaggacggtacatacgagttcttcggcggcctctccaagggtgttgaaaagcgcgacaaggtgcgcacgcgcgttattgccgcgacgctttccgaccacattaaatcgagcgaccatattttcatcatggggcacacgaactccgaccttgacgccgtgggcgcggcggtcggcatgtgggcggccgtgacgaaaggccttgaccgccgtgcaagcattgtgatcgacaagggtcgctctatggcgacgacgcttatcaacgcgtttgagcatcagccggagtatgaaaacatgttcatcactccgcaggaggcgctcgaccgctgcacgcagcgctcgcttctcattgtggtggacacacattccacctcgtttgtggagagtcaagaagttttaaaggccattccgcgcgtggtcgtcatcgaccaccaccgcatgatggtgacgcacattgaaaacgcgatcatcttttaccatgagccgtacgccagctcggcttccgaaatggtggcggagctcgtgcagtatatcaacagctctgcgctcaataaaaaagaagcgacggcactgctttccggcattatgctggacacaaaaaacttcgttttgaagacgggcgtgcgcacatttgaagcttccgcctacttaaagcgccgcggcgccgacacggtggaagtgaagaagatgtttgcaaattcgctcgatacctataaagagcgctctcagcttgtggcaggtgcggaggtttacaagggctgcgccattgcgtgctccaactgggaattcccgaatgtgcgcattgcggcggcgcaggcggcggacgagctgctgtccattcagggcgtgcgcgcgtcgttcgtcattttccgcgtgggcaatgagattgccatttcggcacgaagtctcggcgacgtgaacgtgcagattttgctggaggaattcggcggcggcggtcacctcaacatggcgggcgcgcagattaaaaacagcaccacgaacgatgtgcgcaaggcactcatccgcgtgctggacgaaaagctttccgaagcgacgaaaaagaataactaatgcggcaaagcggcgcgaagccgtttgactgctttagcgatagatttaaacgataggagatacgaccatgaaagttgtacttttagcagatgtaaaaggtgtaggcaaaaaaggcgagctcatcaatgcagcagaaggctacgcacgcaatttcctgctgccgcgcaagcttgcaaaggaagcgaacgcacaggtgatgaacgagctgaaaaacgccgaggcctccaaggcatataaagtgaaaaccgagaccgaagaagcgcagcgcattgtggaagctttgaaggacaagaccgtccgcatcaccgcaaaggcgggccagggcggcagactgttcggctccgtcaccgcaaaggagattgcgcaggagattaaaaagcagtacggcttcgacatcgacaagcgcaagatccacctcgacaccgacatcaaggcgttcggcggctatcacattgaggtgaagctctataacggcatcaccgcgaagctggcggtatcggtgaccgaagcacagtaaaagcctgatttccttgatgcgcagcattaaattttgcaatgactaaaagtcgtttacgattagaaaatcgttttcactttgaagtaatttcactcaaaaagggtggtaaaaatgccggaagataattttcaactgaatacgccggcactgcccggaacggtgatgccgttcagcgcagaggccgagcaggcggtgctgggcgcggtgttgctggagcccgactgtctctcgaccgtggcggaaatgctgccgcgcgcggactatttttatcaggtcaataaccgcacgatttacagcgcgatgctcgatatgttcacggcaggccagccggtggacctcgtcacgctgctggagcacctgcgcgaagaggaaaacttcgatgagggcagcggaaaggtgtatctgatgcagcttgcgcagcttgtgccgagcgtctcgaatgtggagcgttactgcaccattgtgcgtgaccgttacgatttgcgtatgctcattcaggcggcgcgcggcattttggatgacgccatggaggacaccggcgaaacctcgctcctcttggattccgccgagcagcgcatttttgacatccgccggggcaaggcgttaaaggggcttgagcgcctgaacgaagtgctgtttgagacgtttgaacgccttgaccgcttgaattcgccggacaaagacctgtaccgcggcatccctacgggtatccgtgaactggataacacgatcacgggcctgaaccgctccgaccttgtcatcatcggcgcacgacccggcatgggaaaaacgagctttgcgctgaacattgcgcgccatgccgccatcacggcgggcaagcgcgtggcgtttttctcgctggaaatgagcaaggagcagctcgcttcccgtatcatctccacggaggcactcgtcggcggcacaaagctgcgcacgggcgacttgacggagggcgaatggacgcgccttgtggaggcgggcgatattctctctaaggctgatttgtacctcgatgattccccgggcattacggtgccggagatgaaagcaaaagtgcgtcgtttaaaagacgttgatcttgtcatcatcgactacttacagctgatgaacagtgcaaagcgcattgataaccgcgtgcaggaaatttccgagatcacgcgaagtctcaagatcatggcgaaagagctgaatatcccggttgtgacgttggcgcagcttgcccgtgcaggtgaaaaacggcaggagcaccgcccggtactttctgaccttcgagattccggctccatcgagcaggacgccgacatcgtgctgttcctgtaccgagacgcgtactacgcgaacgaatcggcttcgcccgaagacgtggacaaaaacagcgccgaggtcatcgtggcgaaaaaccgtcacggcgatctgcgcagcgtgccgctgcactggcagggtgagttcatgcgctttacatcgcaggaagttgtgcgtcatgaaaactgaggacattctcgcccgcgtgcggtatgatctgccggagacgggaaaaattgtcgtggggctttccggcggggcggattccgtgctgctgacgtatttgcttgcacaaaagtacggcgcggagcgtttgcttgcggtgcatgtgcaccacggcattcgtggggcggaagccgaccgcgacgcggaatttgtgcaggactactgtaaagcacttgaacttcactgcaaggtgatttataaggatattcccgcgcttgcggccgtaagcggcgagggcgtggaggaatgcgcgcggcgcgtgcgctacgcgtgctttgcggaggaagcaggggaaaacgggtgcatcgccacggcgcacaacgccgacgataatgccgaaacgctgcttttgaacctgacgcgcggcatggggccgcacggcgcagggggcattccgccgcggcgcggcagaatttatcgcccgattttgaacatttcccgcgcagaggtggagcgtctctgtaaagtatatcaacttgactacgtgacggactccacgaatttgacggtggactacacgcgcaataagctgcgccacagcgtgctgccggtgctgaaggacgtaaacccgcagatgacgcaggcgacgtcccgctttgcggagagcatgcggttgcagaatgaatttgtgttttcgtgcgcgaatgaattgctctgtaaagcgaaaacgccttacgggtatgacttgaaaattttgcggagtgcgcacgaggcggtgctgcgcgcggcactggaactgctgttatcgtcttacgggcggctctcttatgagcacatttgcagggcggcgagctgcgttttcatgggcggcagcctctctttgccgggggacatcgtgctggaggcgaagcaggacacactcacggtacgaaaaaaccgggagataaaagaccggaatgtgttttctgttccgctgagagcgggcgaaaacgtgcttccgaacggaaaaacgctgtttgtgaagaaaaaaattcccgaaaaagaagaaatcgaccggaaagttcataatttgttattccaaaacttttcggattgtgataaaattacgaatgttccgagagtacggacgcggcgcgcgggcgatgttttcagacccgcagggcgcggcgtgacgaaatcggtcaaaaaaatcctgaatgaactgcgcattccggcggcggcgcgcgaccgtttgctgctgcttgaaaaagacggtgagatcatctggatcgaagcggtcggcgcggcggagggctatgcggcaaagccgaatttcccggcactggagcttacggtgacggacacggcaggcataacccgcatataaagcggaaagaattttgaggaaagggtcatccgaatggaaaacacaatgttaaacgatatcaaggaagttttgtacagcgaagcgtacatcgacagcatggtcaagcgcgtgggggcggaaatttcccgcgattacgccgataaaaacctgctgcttgtcagcgttttgaagggttctgtcgtctttatggcagaccttatgcgcgccattacgattccggcccgcatcgatttcatgtgcgtttcgagctacggctccggcacgaagacctccggcgttgtcaagatcatcaaggacctcgacatcaacctgaagggctatgatatcgtgattgttgaggatattctcgacagcggcaagacgctgcactaccttgtaaaccttttgaaaagccgcgagccgaacagcattgagatctgcacgctgttcgataagccggagcgccgcgaggtggaggtctacgcaaaatacaagggctgcgatattcccgatgcgttcatcgtgggctacggtctcgattttgatgagaagtacagaaacctgccgtttgtcggcgttttgaaacctgaagtctacggtgaagtctaagctcccgttttgataaaaaagtttctgtttctatttaaggatacgctttgtatccaatttgatttccgggaggtcggaacttgaacagcaacaacaaaaaaatcattcgcaatcttttgatctacctcggcattccgattttgctcgtcgtgctgcttttgcttctgtttgaccgcggggcagaccagacggggctgaaatactccgatgtactgtcttactttgaagacggcaaggtgagcgcatactcgctgaacctgggcacgggcgagatgaagctgaccgtgacagaggacagcagcaaaaaggaatccgttgtgcgctacacggtgccgaacgtgaacctgttctacaacgacgtttcggactacatcaagtcgtataacgaggaacatccgaataaccgcatgacgcaggatgtcatccgcccggcggagacgagctggcttgtcagcctcattccgacgttgctgatgatcgcgctgcttgtggcgttctgggtattcatgatgaagcgcatgggcggcggcggagccggaaaccagatgaatttcggcaaagcgaaagtcaagcaaataaacgacgaaaagcgccgcacgacgtttgcggacgtggcgggcgcggacgaagaaaaggaagagctgcgcgaaattgtggagttcttaaaacgtccgaataagtataacgagctcggtgcgcgcattccgaagggcgtgctgctcgttggccctccgggcaccggtaaaacgcttttggcgcgcgccgttgcaggcgaagccggcgtgccattcttctccatttcgggttccgacttcgtggagatgttcgtcggcgtcggtgcatcgcgtgtgcgtgacctgttcgacaaagccaagaaaaaccacccgtgcatcatcttcatcgatgaaatcgatgccgtgggccgccagcgcggtgcgggtctcggcggcggccacgacgaacgtgagcagacgctgaaccagctgctcgttgagatggatggcttcggcgcgaacgagggtgtcatcatgatcgcggcaacgaaccgcccggatattctggacccggctttgatgcgtcccggccgtttcgaccgccaggtgatggtgggctacccggatgtgcgcggcagagaggatattctgcgcgtacatgcaaagggcaagccgcttgcaccggatgtggacctttccaccattgcaaaatccaccgccggctttaccggtgcagaccttgagaacctcttaaacgaagcggcgctgcttgcagcccgcaaggaccacaagtccatcacgatggaggaaatcgaggaagcgacgatcaaggtcgttgtcggcaccgaaaagaagagccgcgtgatgacaaacaaagaaaagaagctgaccgcgtaccacgaggcaggacacgccattgcgacgtacttctgcgattcgcaggacccggtgcaccagatttccatcatcccgcgcggcatggcaggcggatacacgatgcacctgccgacggaggataagtcctaccagagccgcaacgagatgcgcgaggagctcatcgtgctgctgggcggccgtgtggcggaagccttggtgcttgacgatatttccacgggcgcatcgaacgacattgagcgcgccacgaagatcgtccgcgcgatggtcacaaaatacggcatgagcgaccgtcttggtccgatcacgtacggtgcggacagcagcaatccgttcctcggcaaggagatgggtcatgtctcgaactattccgaggagaccgccgcggagattgacgaggagattaagtccatcatctgcgacgcgtatgataagacgaagaaggtgctctccgaacacattgacctgctgcaccgtttggcgggtgtgctgtttgagcacgaaaagctggacgccgacgagttccttgacgtgatgaacggcaagttgctgccgagcgcacagactgccgctgcgggcatcatcccggcagaagcggcagcgccggaaacgacagagctgccgaccgaagcgcagacggaaccggaagcgaacacgaacgaataaatttttgacgaaagggaatgtgctcatttgcattccctttacgtttgtttatgggcaatcccgtgcgggtgttattttgcccgcttgaggaaaggaacatggtgaatggctaaaaagcaaacctacggcaacgacagcatcaaaagtctgaagggcgcggaccgtgtacgtctgcgtccggcggtcatattcggctcagacggtctcgacggctgcgagcacgcgattttcgagatcctctcgaactccattgatgaggcgcgccagggctacggcaaggagatcaccgtcacacgctatgccgaccattccgttgaggtggaagaccacggccgcggcatcccggtggattacaacaagcgtgaggagcgctacaattgggagcttgtgttttgcgagatgtatgcgggcggcaagtataacaacaatgacggcggcaactacgattatgcgctgggcctgaatggtctcggtctgtgcgccacgcagtatgcctccgaatacatggacgcggatattcgctacgacggcttccgctatacgctgcactttgagcacggcgagaacgtaggcggactcaataaggagccttacggcaagaaggccacgggctcgcgcatccgctggaagccggatatcaaggtgtttacggacattgacgtgccggcggactattacacggacatcatcaagcggcaggccatcgtcaacgcgggcgtgaagtttattttcaaaaacgaagtttcgccgcgcaaattcgagacgacggaattctgctacgaaaacggcattttggatcacgtgcgcgagctggtgggcgaagatgcgctgacctccgtgcagttctggcagtccgaaaagcgcgtgcgcgaccgcgaagacctgccgctttacaatgtgaagatcaatgccgcggtggcgttttccaaccgcgtgcatttgacggaatactaccacaactcgagctggctggaatacggcggcgcgccggacaaggccgtgcagaacgcgttcgtgtaccagattgacgcgtatttgaagcaaaacggcaagtataataaatccgaaagcaaaattaaatttcaggacgtggaggattgccttgttatcgtcatgtcctcgttctccacgatgacctcctatgagaaccagacaaagaaggccatcaacaacaagggtattcaggaagcgatggtggagatgctccgccataatctcgaaatttatttcatcgaaaaccccattgaggcggagaaaatcggcgcacaggtgcttatcaacaagcgctcccgcgaggacgccgaaaaaacgcgcctcaacttaaagggcaagctgacggccaaaatggatatcacggggcgcgtggcgaagtttgtggactgccgcagcaaggatgtttccgagcgtgagatttttatcgtggagggcgattccgctctcggtgcggtcaagcaggcgcgcgacccgaactatcaggctgtgatgccgatccgcggcaaaattctgaactgcctgaaagcggattacgacaagattttcaaaagtgagatcatcaccgatctcattaaggtgctcggctgcggcgtgcaggtaaagtcgaaggcgaacaagtccattgcgtcgttcgacatcaacgcgctgcgctggagcaagatcatcctgtgcaccgatgccgacgtggacggcttccagatccgcacgctgctgctgacgatgctgtaccgtttgacgccgcagctcatcgaagagcacaaggtgttcattgcggaatcgccgctttatgaaattacggcgaaggataagacgtattttgcgtacaacgagcgcgaaaaggacgagtttttgacgcagcttgagggccagaagtttacgattcagcgctcgaaaggtctgggtgaaaacgacccggacatgatgaacctgacgacgatgaacccgaaaacgcgcaggctgattcaggtgaagcccggcgatgccgaaatgacggcgcagatgtttgatatcctgctgggcgataatcttacgggccgtaaggactacattgcgatccacggcagcgagtacctcgatgacctcgatatttcttaaagctctgacgaaaggaagcgtaaagcatggcaagaaaaaaacagccgaaaagagagaatacgccgaagatgcagggctttattgcgggcgcgggtgaaattcaggcgcaggacatcaacgatacgctgcggcagaattacatgccgtatgcgatgagcgttattatgtcccgtgccatcccggagattgacggctttaagccctcgcacagaaagcttctctatacgatgtacaaaatgaacctgctcggctcggcgcgcacgaaaagcgcgaacatcgtcggtcagacgatgaagctgaacccgcatggcgacagtgcgatttacgacacgatggtgcgtctttcccgcggctacgaggcgcttttgcacccgtatgtggactctaagggcaacttcggtaagttttattcccgtgacatggcgtgggcggcttcccgttacacggaagcgcgccttgaccccatctgccgcgagctgttccgcgacatcgacaaggacaccgtggattttgtcgacaattacgacagtacgatgaaagagccaacgctgctgccggcggcgttcccctcggtgctcgtcaacgcaaacacgggcattgcggtcggcatggcgtcgtccatttgcccgtttaacctcgccgaagtgtgcaccacggcggcggagctcatccgtgacccgaagcacgacatttttacgacgatgcaggcgccggacttcccgggcggcgggcagatcattttcgaccgcgcggcgatggagcagatctacaaaacaggccgcggcagcatcaaggtgcgctcgcgctacacgtatgataaatccgcaaactgcatcgatattacccagatcccaccgacaacgaccattgaagccattgtggaaaaggtcatcgaccttgtgaagcagggcaaggtgaaggaaatcaccgacattcgagacgagacgggtctggacggactcaagatcacgatcgacttgaagcgcggcgcagaccccgataagctgatgcagcgattgttccgcatgacgacgctggaggacagcttctcctgcaattttaacgtgctcatcgcgggcattccgcgtgtgctgggtgtgcgtgagctctttgaggagtggacggcgttcagaattgaatgcgtccgccgcagaacgcactacgacctcacgaagaagaaagagaagctgcatctgctctacggcctcaaggcaatcttactcgacatcgataaagccgtgcgcattgtgcgtgagaccgaggaagaaagcgaagttgtgccgaacctcatgatcggctttggcatcgacgaaattcaggccgaatatgtagcggaaatccgtttgcgccatttaaaccgcgagttcatcttaaagcgcaccgaagaggtgaacagcttagaggaagaaattcgtgaccttgaggcaattttggcctcaaaaacgcgcattaagacgattattgtgcgcgagctgaatgaaatcgcgcagaagtacggccagccgcgccgcagccatattttgtacgcggaggaaattgccgaggaagagcccgtggagactgtgccggattacccggtgaacctgtttttcacgaaagaaggctactttaagaagatcaccccgctttccctgcgcatgggcggcgaccagaaattaaaagatggagacgagatcgcccaacagatggaatcgacaaacgcggcagagcttttgttcttctccgacaaagcgcaggtctacaagctgaaagcggcggattttgccgacaccaaagcgagcgtgatgggcgaatatgttcctgcgcgcgtgcagatggacgagggcgaaagcgctgcatacatggctgtaacgaccgactttaagggctacatgctgtttgttttcgataacggcaaggtcgccaaggtggagctttccgcgtactacacgaagacgaaccgcagaaagctcattaacgcgtattccgacaaggccccgcttgcggcggcgctgcaaattttggaagactgcgatgtgctgctgacgtcctcaagcggcagacgactgctcatgaacacggcgctcatcgccccgaagacgacaaagagcacgcagggcgtggcggtgatgaacctgaaaaaaggccaacgcattacggacgcgcatatctaccaagaagacgagctgcagaacccgtcgcggtacagaaagaagattccggcgctcggcgcactgccgaacggagaggagggcggcgagcagatctcgctgtaaaaaatcagccctccggcaagaccgtttggcgttccgtttgtgcaggcgtgtggcctgcgcggcagagcgttcagtcctactgaagggcgggcagcatacagtccgcaccatggactgcgccgcccgcccgggaaaggccccgctcgtgtgacgcgaaagtgcggttttgccgcacggtccgttttggcgcgcacaaacgcctgactgtgactgccttggtatcagtatggacgtaggacggcggaatatgcaggaaaaaagcaaaaaatcctgttgcaaaatcccgctttgtatggtatcataattaagctacgaataaaattagcgttaagtctcttgaagaggaggtaaaatatatgggtgctgttgaaattattttcggtatcgttctgcttcttttcgcactggcgatcatcattgtcgtactgttgcaggaaggccatcagcagagcctcggcgcgattaccggcggcgcggatacgttcctttccaagaataaggcgcgttccatggatgcgttccttgctcgttggacaaagttcattgcgatcggcttttttgtgctggtccttgtgatcaacatcattatgtatttcacaaagtaagtaaatacttgcggaaatgcgcctcgcttttcgatgggtctccattcggaatgcggggcttttgtttttataaatcaggctttaggagggaatatcatgtttgaagagattgaacgcctcacccgcgcgctgtgcgcagagcacggcacatccggctgtgagggcgacgtgttcaaagttgcgaaaaaggagttcggcttctgcaaagaggtgtgtgagaacgagcttggcggcgttgtgggcattttcggcgatttgaattctaagcgccgcattttgctggacgcgcacattgaccagatcggtatgatcgtgacggacattgacgaaaacggctttctgcatgtgacgaatgtgggcggtgtggaccgccgcacgctgccgggcagccccgttaccgtgttcggcacggagaccgtcacgggcatcggctgcacgctgccgccgcaccttgcaaagggcgatgataagataaagcccgttgcggagcagtgcattgacttagggcttccgaaagaggaagtggagaagctcgttgctgtcggcgaccgcgccgcactgacgcgcccgctgaaaaagctcatgggcaaccgcatcacgggcacggcgctcgacgaccgtgcgggctgcgcgtgtgtcatccgcgccgcacagcttgcaaacgaacagaaccccgattgctgcgttatggtgctgtgctccacaaaggaggaggtcggcgggcagggcgcgcaggtctctgcgtatgcacttgagcccaccgaagccattgccgtggacgtttcgttcgcaaagcagccggacgcggagagcatgcttaccgcggagctcggcaaagggccgatgatcggcttctccgcggcgctggacagaaaaatcagcaaaaagcttgtcgagctcgcaaagcgcgaaaatatcccgtatcagctggaagccatgggcggcagaacgggtacgaactgcgacgagatcagcaccacccgcggcggcgtgcgcacggggctcatctccgtgccgcagcgcaacatgcacaccccggcggaggtctgcgattttgaggatatggagaacatcgcaaagctcatcgcggcgtatatcacggataaggaggcgcagccgaatgcttaactatgaaattctggaaaagcttacccgcaccatcggtgtttccggcgaggaagacgatgtgcgcagcgtgatcttaagtgaaattgagccgtatgcggacgagattcacatttcgccgctcggcaacattctggcgtttaaaaagggcgaaaagcgtcccgagaagaagctgatgctctgcgcccacatggacgaagtgggctttgtcatcacaaacattacggaaaacggccttttgaagttcacgacggtcggcaatatccgcccggaggtgctctccggccgcgatgtgctggtgggcggcaaaacaccgggcgtcatctgcgcaaagccggtacatttgctcaagggcgatgaatttgaaaagcccgtgcccgtgaacgagctcgccatcgacatcggcgcagatacacgtgagcaagccgagacattggtgcagattggcgacaacgcgtgctttgtgccgttctttgagcacgtgcacggtacggtgaaggcgaaggcgctcgatgaccgcgtgggctgctttgcgctcatcacgctgatgcagcgcccgctcgaatacgacacgtatttcgtcttctccacgcaggaggagattggcctgcgcggcgcgggcacggcggcgtatattctggagcccgatgcggcgcttgtgctggagggcacgacggcgggcgatattcccggcgtgagcccgacggacgcagcgtgcaaaatgggcggcggcgcagtcatttcccttacggatatgcgcaccgtttacccgaaggattatttccgccgcgcgatggcgctcggtaaagaaaacagtattccggtgcagccgaagaccgtgcgcgccggcggcacagacgcgggcaccattcacgtttcccgcggcggcgtgaagacgctgacgatctcgcacccgtgccgctatatccacagcgcgatcgcgatgacgaccgaaaaggacatagagactgttattgacctgacggcgctgatgatggcggaaatttccggcggcaagctgtaatgatccgtcttgcggaaaatttagaagcgctctctatgccgtgcggaagctcgccgtttggctgccaaatccggtctaaagcgcaggcgtatggcttccatcagtcgttcgcgcagttttggacggacggggaagccgcctacggaaaaacagacggctccgtctgcattgcgggggagatcaccgacgcggacgaggcgcgtgcgtttttgagtgcggtgggcacaaatgaagtcgtgtgcagcgcggagaatgccgaaaagctggggctaaacatcaccgaaagcggcgcaattttgcaaaaggtgctgcgaaatgggactgtgcagcctgcggaggaaatttctccgagagagatttatgctgtgttgaaagcaaacggcatggtgggggagttcgagccgttttacctcgatttatcccaccgcatgcggcacggcacggtgcgctgcgcgggtgtttcggcagatgggaagaccgtcgcagtggctgcagcagtgctcggcgaaagcgcgagcctcatttctgctgtggcggtgctgccgaaatttcaccgcagggggcttggcacggcggttgtccgaaaaatggagcggatgctgccgaacggcacggtgtatatcctgcgcgaagaaagcaaaaacgaggcgttttatgacgctttggactataaaccgtgcggcgcatgggcgcagggaaaattatgcaattaaaataattcagataaaggaaggcttttgcgtttgcgaaagcgggtttactatgtacgagttttttaaaattgatgaccgcgtgctgaaggcggcggaggaagcggagcagaaggctgcgccgtaccttgcgaaaatttccgaaacacagcggtataatcaggagaagatgcaggctgcgttcatgcaggcaggcgtcagcgagagccactttgtggcaacgacaggctacggctatggcgaccgcggccgcgacgtgctggatgaagtgtacgtgcgagccctcggtgcggaggacgcgctgtgccgccataattttgtcagcggcacgcatacgcttaccgtagcgctttttggcgttctgcgcccgggcgatacgatgctgagcgttaccggcatgccgtatgatacgctgcgcggcgtgatcggcattacgggcgacggcaacggctcattaaaggagtttggcataaactacgagcagcttgacctgctgccggacggcacgcctgactatgacggcatggagacgaccatcacgccgaagcaccgcatggtgtacattcagcgctcccgcgggtacagcctgcgcccgtccctgacggtggaggagatcgagcgcattgtaaagatcgcaaagcgccgtgcgccggactgcattgtcatggtggataactgctacggtgagtatgtgcagaaaatggagccgacggctgtgggcgcagaccttatggcgggttcgctcatcaaaaacccgggcggcggcattgcgcctacgggcggctacattgcgggccgtcgcgaccttattgaaagctgcgcgtatcgcttgacgaccccgggtacgggtcgtgagatcggctgcacgctcggcaacaaccgcgagcttttcatgggcacgttccatgcgccgaacgtcacgggtgaagccttaaagaccgctgtgttcacggcggcgctgtttgagggctttggctttgacgtgaccccgcgctacgatgagccgcgcgcggatattattcaggcggtgcagctgcgcgagcgcgaggcactgtgcgcatttatccgcggcattcagcagggtgcgccggtcgattccttcgttgtgccggagccgagccctatgccgggctacgactgcgacgtcatcatggcgtccggctcgttcacgttcggctcgtccattgagctttctgcggatgcaccgctgcgcgagccgtttgcggcatggatgcagggcggcgtgaacttcaacagcggccgcctcggtgcgattttggcggcacagtccatgctgaacgcaggctttttgaatctctaaattataaatttttggcggcaggcttcggctcgccgcttttttgttgtcaatttatccggaagataaaacttttatctttctttttgaataaaaccgtgctatactttttttaacaactttttaggggtgttaccatgagagacagaaaaaaggcgcaggctttggcgcacgagcttgtttccaaaatgacgatagaggaacgcgcttcacagctgaaatttgatgcgccgcccgttgaacggctgggcgttccggcgtacaactggtggaacgaagcgctgcatggtgtggcacgcgccggcacggcgacgatgtttccgcagcccgttgccatggcgagtatgtttgacccggagatgatccgaaaaatcggcgatgtcgttgcgacggaggcccgcgcgaagtataacgaagcttctaagcacggcgaccgcgatatttataagggcctcacgttctggtcgccgaatatcaacctgttccgcgacccgcgctggggcagagggcaggaaacgtacagcgaagacccgtacctcacggcgcagctcggcgtggcgtacatcaagggcttgcagggggacgggaaatatttgaaggtcgcggcgtgcgcgaagcactacgctgtgcacagcggcccggaggccattcgccacgaatttgacgccgaggtgagccggaaggatttgtgggagacgtatctgcccgcgtttgaagccgcggtgaaagagggcgaagtggaggccgtgatgggcgcatacaaccgcacgctcggcgagccgtgctgcggcagtgacctgctcatccgcaaaattctgcgcggcaagtggggctttcagggacactttgtctccgactgctgggcgatttccgattttcacctgcaccaccacatcacgaccaccgcgccggaatccgctgcgctcgccattaagatgggctgtgacgtaaactgcggcaacacatatctgcatttgctgcgcgcgctcgaggacgggctcatcaccgaggacgacatcacgacggcggcggagcggctctttaccacgcgttttatgctcggcgagtttgacgagaactgcgaatacaactccattccctatgaggtcgtggagtgcccggagcatttggcgctcagcgaggaagccgcgcgcagaagcgttgtgctgctgaagaacgacggcattttgccgcttgataaaacgaaaatcaagacgatcggcgtcatcggcccgaatgcgaacgaccgcatggcgctcatcggcaactaccacggcacggcgtcaagatatatcacggtgttggagggcattcaggactatgtaggcgacgacgtgcgcgtgctgtacgccgagggttgccacctctacaaagaccgcgtagaggggttgggcctgcccggcgaccgcctttccgaagccgagaccgtggcggagcacagcgacgttgtggtgctggtgacgggcctcaatgaaaatcttgagggcgaggagatggaccagagcaattctgttggctccggagacaaggcgaatttgctgctgcccgcaccgcagagaaagctgatggaggttgtcgcgaagaccggcaagcccgtcattctcatcaatatgaccggcagcgccatggatttgcgctttgcggaggaaagcttctccgccgtagtgcagggctggtatccgggtgcacgcggcggcaaggcgattgcggagcttttgttcggcaagtattccttcagcggcaagctgcccgtgacgttttataacgactccgacgagctgcccgcgtttacggattacgcgatggaaaaccgcacgtaccgctactttacgggcggtgtgctgtatccgttcggctatggcctcacttacggtaagacggaagtgacgaaagccgaaatgcgtgatgacggcgagcactatacgattacggcgacggtcaaaaatgagggctgtgccgtgcatgagattttgcagatctatgtgcgtgacaatgaatcagaattcgcggtgcgtaaccacagcctttgtgcgtttaaggcggtttcactcggtgcaaatgagacgtgtgacatcgagatcaccttgccgaaggctgcgcttgaaattgtggatgacaccggcacgcgccgcgtagacagccgcagcttcacgttcttcgttggcacctcgcagccggatgaccgcagcgcggagctgcttggtacccgcccggttgcggtagaactcaagctgtaataaatgcaaacgaccctttcgcggcaatttgcccaccgaaggggtcgttttgtctgtgacttttttaaggctttccatttacaaaatttatcgaaagctgtatactgatactgctattttttaattcggaaaggcaaaagtatggctgcagatgtaaagaaaaacgatgatttttcaaagggaccgatttccaaaacggtcctgcgccttgcggtgccgatggtgctggcgcagtttgtgaacgtcttatataatatcgtagaccgcatgtatatcgggcatatttccgatacatcggtagatgcgctgacgggcgtcggcgtgacgtttccgattttactgatggtgacggcgtttgcgaatttattcggctcgggcggtacgccgttgttttctatggcgcgcggtgcggcacagcagggcggcgaagagggggaaaagcagcgtgagcgcgccgcagacgtgatgaacaacacgttctcgatgctcgtcattacgggcgtaattttgtgcattgtggtgctgctcgtcaaaaagccggtgctgtatctcttcggcgcgagcgacgcgacgtacccttatgcggacagctatctttcggtttacatgctcggcagcgtattcatgatggtctcgcttggcatgaacgggttcatcaatgcgcaaggctttgcgaaccgcggcatgctgacggtcgttatcggcgcagtggtgaacattgcgcttgacccgctgtttatttttgtgttcgacatgggtgtgcagggcgcggcgcttgcaacggtgctttcgcagctcgtttccgccgtgtgggtggtgcgcttcctgctcggtaagcgtacgctgtttcgtttggagttaaagcgcatgcgcccgcaggcaaagctcatcggcaagatcacctcgcttggcatttcgggctttatcatgggctttacgtcgagcgctgtgcaggtggcgtgcaacgcgatgctctcgcaacacggaggcgacctgtttgtggcggtcatgacggtcatcaactccattcgcgaagtgacatatacgccggtaaacggtatgacatctgccgcagcgccggtggtcagcttcaactacggcgcacagaaatataagcgcgtgcgcggcgtgattgtgttcacaacggtcgtttcattcagctatatggtgcttgtatggctcgtactaaggctgttcccgcacgtgtttattcagctttttaacggcgacccgcagttactcgaaacatgcacgcacgccatgcacatttatttcttcgggtgctttatgatggcgctgcaaatgtcggcgcagtctgttgtgcaggcgatgggccgcgcaaagcaggcgattttcttttcactgctccgcaaggtcatcatcgtcattccgttgacgtttttgctgccgcagatccccgctgtcggtgtggacggtgtgttctgggcagaggttatctcgaactttgtgggcggcggcgcgtgctacattacgatgctgtgcaccgtttggcgcgaattaaaacacaaagaaatgggcgagcttgcacaggcgaaaaagtaaaaagaacggagccgcgcatgggtgataaacctgtgcggctccgttttttgtatgcggtttattctgcggtgtcgggtgagggggcggtgctttctgtgccgcttgcatcgctttcggaagcggtcggctctgcggcggggtaatcgaactcgcccagcacatcgccggtcgtttcatcttttacggtgaagtgcaccgtgaagctttctgcgtcctcgcccgtaaacgctgcgtagagcagcgcgggaatgtacacggcctgcgcagcggcgttgtcgcgctccggtttatacaggtctttggtgctcagaatttcggcgctgcggccgtcttcggaaagtgtgacgctttttataaacggccacgcgccgtcctccggcaaagcgatgatctgctcgtgcaggctttccttcagcgcggcgcagacggcatcgcgctcgtcttttgtcatttctaccgtgcaggagccgtcatcatttgtggtgacgtttgtaagccccagccggtgcgccgcggcggtgatgtcaagccctgtgcggcgcagggtgtccttggagatttgcacggtgtaatcccgctgcggttcggaagacgcggcggcaggcgcttcgcttgccgtttcggtctgcccgctgcacgatgccgaggaaaggatgagtgctgccgcgagcagaagcgctgccaaaagccgttttgcgtttctcattttgaacacctctttatgagcttatcttaaactatatcataccgtattcggcgaaaaaagtcaaaagaatcaaaaagctgttcaaagtcggaactttttcacaaaaatatgtggaaacagaagaaaaaacatggtatactgaaaccgatcatgcagggaatggagggatccgattgaccggtgcgattttaggagacattgccggctcgcggtttgagttcagcaaaccgagcgggttcaactataaaaaggtggagctttttgggaacaactgctttttcacggacgatacggtgctgaccatcgcgacgaaatacgcgcttttaaatgatatcagctatgcaaaggcttatggcaaattcgggcgtatgtacagaggcgtggggtacggcacgatgtttcagcgctggctggacggacatgccgaaacgggatacggcagtttcggcaacggcgcggccatgcgcgtcagctacatcgcttaccactttgatacgctggaaaaggtggaggaagaagcgaaaaacagcgccatgtgcacacacaaccacatagagggcctgaaagcggccgttgcgaccgcggggctcatttaccttgcgctgcacggcgagcgcaaaaaggacctgaaaaaatactttaacaaagagtttgaataccccgtgcataagccgctgtgggcgtaccggccgaaggcgaagtttgatgctacggcggaggggaccatgccgcttgcgttccgttgctttatggaaagcgaggattgggaaagctgcatccgcaatgtgttcagcgtgaagtgcgacaccgacaccgtggcgtgcattgcgggcggcattgcgggcgcatactataagcggacggtggaaaacgaaaaggatcttttaaaacgctaccttatcaagcccgataagcgcaaggttggcgagtttgaccgctttttatacgattgggctacaaagtaacatttccgcatatatttgaatttcggtttcgaaaaaccgcctgtgtttttttgaagcgggcggagcgacgcagggatcgccgcgatttttaagggaaagggtttatcagaacatgattattgacacatatcagtccggcgccgtgatgcgtattttgcaaagcggcaagatttaccgcgcaagccccagtatttcgtttaagaaggagtacgccgcgctcatcgatatgctcggcctgcactgcgagtgccccattttcggcgtggtgcgcggcagaaagcagaataccggcggacgcgtttcgggtgcggtgcgcatccgtctcaatgtcccgcgcgaatacgtgaagctgaccgagtacaccgactgggcggattttctcgacaacttcaaatacacgaacccgaacgattattccaccatcatcgtcggcagcttggatgtgaagtcttcggatcatctccgtgtggtggagagccttaagcaccagcggcatctgttccagtacaaaatgccgcaggcgattttggagtatattgacccgaaatgggtggtacggtataaagtcatcacaaacacaagagagcaggaggaccgcaaggagcaccggctcaatttcttccgttggtaaggagggcttgaacttgaaaatcggtcaatacattttatcgcttgaccagggtacgaccagttcgcgcgccgtgttgtttgacgctttgggcggcattgcgggcatgggacagcgcgaatttacgcagatttacccgcagcccggctatgtggagcacgatgccgtggagatcttgcagacgcagctttacgccatgcggcaggcggtgcatgaggcggagatcaccgcggaggacatcgctgccatcagcatcacgaatcaaagagagaccaccgtggcgtgggacagcgagacgggtatcccgatctgcaacgccattgtgtggcagtgccgccgcaccgcgccggaatgcgagcggttaatagccgagggacttgaggggtacattcataaaacgacgggactcatcatcgacccgtatttttccggcaccaaaatgaagtggattttggatcacgtgccgaaggccaaagtgcttgcgaaggagcatcgcctgcgcttcggtaccattgatacgtggctcatttattcgctcacggagggcgaaagctatgtgacggacgtgacgaacgcttcgcgcaccatgctgtttgacattcaaaagcttgattgggacgagaaaatgctgaacgtgttcggtatcccgcgtgacgcgctgccgaaagtcgtggactcctccggcgttgtgggcatgtgctccgaaacgatactcggcaggaaaattccgattgcgggcattgcgggcgaccagcacgcggcgctgttcggacagtgctgctttgataagggcatggcgaaaaatacatacggcacgggctgctttgtactgatgaacacgggtgataagccggttttctccgaccgggggcttattacgacgatcggttggtgcgtgaatggcgagacgacctatgcgcttgagggcagtgcgtttaacgcgggctcggccatcaaatggctgcgcgatgagttgaagcttatcgcgaacccgcaggaagcggaccttcttgcggagaccgtggaggacgcaggcggcgcggtgtttgtgccggcgtttacagggcttggcgcaccgtactgggatatgtatgcgcggggcgcactgctcggcgtgacgcgcggtacgtctaaggcgcacatctgccgcgccgtgctggaaagcattgcatatgaaagctatgacctcgtgaaagccatggaagcgggcagcggcacggaaatttctgagctgcgcgtggacggcggcgcatcgagaagccgctttttgatgcagtatcaggcggatttattgcactgcgccgtgagacagccgaagtgtctggagaccaccgcgctcggctccgcgatgctggcggggttggccgtcggtgtgtgggaatcgctggatgagcttaggactgtgtggaagcttaaaaatgcgtatgacccgcaaacggcagctggcagcgaagcaaaagcgctgaaacgctggcataaggccgtggaaagatccatgggctgggcggacggtttggattaagctgcccgtaacgtggttaaaaattttcgccagcctttttcaaaaggctgtggaatccaagggtgaaacccttggtcgagctccacagagctcgaaatccttttgcctaccataaaatcaggacaggagagggaacagtccactggactgttccctcgtgggagacccaattagggggtctcccaaaaggcgccgcaaagacgcctttaaaataccaaacaagctagcatagaagcacgcagaccaaattttctgcgtgctttctttttgcccaaaatcaaagaaagccgttttgacagagggaagcgaaaaatcctgttgacggataaaacaatatgtgatactatattatcacgttaaatcaaagcaatagggaggcaacgggatgatcgtacttatagattacggcgcgggcaatatccgcagcgtggaaaaagcgcttatgcatatcggctgcgaggtcgaagtcacacaggacccgagcgttctcatgaaagccgacggcgccgtgcttccgggcgtcggttcgtttggcgacgctatgcatgagctgcgcgggagagaactggaagcgccgattaaagcgttcgtcgcctccggcaagccgtttttgggtatttgtttaggactgcaaattctgtttgagaacagcgaggagtccccgggcgtctccggcctgtcgcttttaaaaggtaaggtgttgcgtattcctgctgcgccggggctgaaaattccgcatatcgggtggaattcgcttgaaatcaaaaaggacggcgggttgttccgaagcattacgggcgagccgtatgtgtactttgtgcactcgtattatttaaaggccgaagaggacgttgtaaccgctacgacgcagtacggtgtggaaattcatgcggcggtgcagaaagataacctcatggcatgtcaatttcacccggaaaaaagcggagcgttgggactgaagctgctcgaaaacttcgccgccatgacgcagggaaaggggggcgtgtaatgtacgccaaacgcattatcccgtgccttgaccttaaaaacggcagggtcgttaagggcacaaatttcgtgaatttacgcgatgcgggtgaccccgtggaggctgccatcgaatacgaccggcagggcgcggacgagcttgttttgctcgacatcaccgcgtcctccgatgcgcgcggtatcatgctggatatcgtttcccgcgtggcgaacagcatatttatcccgtttacggtgggcggcggcatccgtacggtagaggatttcacggcgctgctgcgcgcgggcgcggataaggtttcggtaaactccgccgcgctgaaaaacccacaactcattgcggacgcggcgtataaattcggcagccagtgcgttgtgatggcgatggacgcgaagcgccgcccggacggcgcgggctggacgctctatttgaacggcggccgcgtggacacgggcattgacgccgtagaatgggcaaagcgcgcggagaaactcggcgcgggtgaaattctgctgacgagcatggattgcgacggcacgaaggccgggtatgacctggagctgacccgcgcggtttccgaaagcgtgagcatcccggtcattgcgtccggcggtgcgggcaagatggagcactttaaggacgcgtttacaaagggtaaggcggacgcggttttggcagcgtcacttttccacttccgcgagatcggcataccggaactcaagggttaccttgcggaaaacggtatcccggtgcgccggtgaaatttaatagaatgattgaaggacactcccgcatatcttttggtgcgggggtgtttacttatgaaaagacattttcttggcttctgtttggctgctgtattgctgatcggtgtgttctgtccgcttgcgcgtgccgagacgccggatttccccgcgcaggctttggtgctgatggaaacctccacgggtcaggtgttatacgaaaagtctgcccatgtgcagcgaccttgtgcgtccatcacgaaggtgatgacgcttttgctcgtatttgaggcaatcgatgcaggcacgctgcatctggacgatatgctcacggcctcggcgcacgcggcgggcatgggcggctcggacatttggcttaaggagggcgagcagatgaccgtagacgacctcatcaaagcgtgcgtggtgatgagcgcgaacgatgcggcggtcgttttggcggaggcggtcgcgggcagcgaggacgcatttgtggagcgcatgaacgcccgcgcggcggagttaggcatgaacgacaccgtttttaaaaactgcaacggtcttgacgaagacgggcacattacgagcgcctatgatgtggcggtgatgagccgcgcgttgatgcagcacgaaaaaatatttgattacacgctcatctggattgattatgtgcgtgacgggcagacgcagcttgtgaacacaaataagctcgtgcgcacgtatgacggcattttggggctgaaaaccggcacgacaagtgcggcgggcagctgcatttcggctgcggcagagcgaaacggtatgcggctcattgcggtagtgctcggtgcggaaaatacgaaagaccgcttttcggctgcgtcttcgctgctcgactacggttttgtaaactggaagctgacgacgccggagcttccggaactgcccgagctgcccgttacgggcggcatggtgagcgccgtttcgcttgcgtgtgaagccccacgcggcgttttgacagcctcgggcggcgcggagatcgggataaagctcattttgccggaaaacgtttctgcgccggtagaaccgggggatgtactcggtacggcggaggtcgcgctgaacggtgacacggtgcagtcgctcaaaatcacggcgaaaaccgaagcgcccgccatcacattttcttccgcattgcaatattttttggcttgttttttcgcagcagaagcggcgtgaaatctgatttgcaaaaaaaccttcgttaacttttcatgaaatccgcgttgtgcacttgcaaaatgcgtcaaattattgtatgatgaaagcacatagatttgacttgtggtgtaccttgcataaagtggggctgtgaaaacggtttcacacgtgcaaaagcatcatcatgcaaataggaggcaataaaaatggcattgaaattggaatgcggatacttgaagggctttatcggcgagcacgaatacgctgcaatggcttctcaggttgagaatgcacatgcgcttctggcatccggcaagggtccgggaaatgatttcctcggctgggtggacctgcccaccaattacgataaagaggaatttgcacgcatcaaggcggctgcggagcgcatcaagaagaacacggatgtgtttatcgtcatcggcatcggcggctcctacctcggcgcacgcgcggcgatcgagttcctcaagagcgagcattacaatgcactgaagaaagatacgccggacatctatttcaccggcaacagtatttcttccaccgcgctggcggagctggttgagatctgcgagggcaaggatatttccatcaacatgatttccaagtccggcaccaccacggagccggctatcgcgttccgtgttttccgcgagatcctcgagaagaagtacggcaaggaagaagcaaagaagcgtattttctgcacgaccgataaggcgcgcggcacgttgaagcaccttgcggacgaagaaggctacgagaccttcgttgtaccggatgatgtcggcggccgttactccgttctcaccgctgtgggtctgctgcccatcgctgtggccggtgcggatatcgacgcactcatggcgggcgcacagaaggcacaggctgcctacaacaacccgaacatggaagaaaacgattgctacaagtatgctgccattcgcaacattctttacaataagggcaagacgactgaagtgatggtcagctacgagccgtgttacacgctcatgaacgagtggtggaagcagctgtacggcgagagcgagggcaaggacggcaagggcctgttcccggcatccgttgtcttctccacagacctgcactccatgggtcagtacattcaggacggcagacgcagcctctttgagaccgtgatgctgtttgagaagccgaagcgcgaagttgtcatcggcaacgatccggcaaacgtagacggcctcaatttcctcgagggcaagagcatggcgtatatcaaccgcaaggcgtttgagggcaccgtgctggcacacaacgacggcggcgtgccgaacgttgtgatctccgctcccgatttctccgaggataccctcggccagatcatctacttcttcgagaaggcctgcgccatctccggctatctccttggtgtgaacccgttcaaccagccgggcgttgaaagctataagaagaacatgtttgctctgctcggcaagccgggttacgaaggcgaaaaagaagcactggaagcaagactttccaaataaaaaggcgtaaatccgcacctgcggaaaaaatacacaggaggacttcactatgatcactcttttaatcggcaaaaaaggctccggcaaaaccaagaagctcatcgagcttgcaaacgaagcggttcagaactccaacggcaacgttgttgttatcgaaaagggccttaagcttacttacgatatttcccacaaggcacgtcttgttgattccgacgcttacggcattgagggcctggacgcacttgtgggctttgtcagcggcatctgcgctgcaaactacgatgtgacggacgttttcgttgactccaccctgaagattaccggcaagggcgttgaggaagttgagccgctcaccgcgaagctcaaggctctcagcgaatcttccgacgtgaacatctgcctgctcatttctgctgacgcagaggaactgccggcttccgttcgggaatttgtcgcgaagtaatttcggcctcaaaaagcctttgcaccgcccgaaacagtaacgaaaagcagtgcaaaaacgaaaaaagcaacagtgtttcggcggaaacgacccgccgaacactttttttcgcggcataatgccgaattttcaaatttttcttgacaaaaccgcgcgtggtatttataatatatcaagtacggtatgaggaaaaactatgcttatcgatttgaaaaaatatttctcgggagaggatatttcacaggcgatcgattatacggtcgatctgtcggaggtggagattgacggctgtaagccgtttgtcacgccggttcaggtcaagggcagcatccgttcgttcgcttccagtgcggagctgaacgtggaggtgcgctatgcgtattcgatgccgtgcaacaggtgcttgacgttgacgcgtaaagagctttgtcacaacatttctcacgtgattgtgaacaagctgaatgatgaagaggattttgaagattatatcgtgattgaaggcgatgagctggatttggacgagctgatttattctgatatcatccttttgacgccgacgaaatttctttgtaaggaagactgcaaagggctttgccccacttgcggcaaaaacctgaacgaaggcgattgcgcctgtgcaaagcagcagacagatccccgtctggaggctctgcggcagctgctacaataattccagataaccaaagttttagtttaatataaggaggtgctgacgatggcggtacccaagagaaaagtgtccagtgccagacagaataagagacgttctaacgtgtggaagcttagcgctcctgcccttatgaaatgcccgcagtgcggagagtataagacacctcacagggtttgcggtaactgcggttactacaacggcagagaagttgttaagaaggaagcataattttgcctgaaacaataattgtgccagatagagaaggggcatttgcgtgctccttctctattgttttgtcggcgttttttggtgccgagccgtaaaacagcggcaaatttcgcgcatactacctcaaaacggaagggagaaaagctgtggcagttgaaattttcggcgtggataaaaacagccttgccgaacgggccggcataaagccgcacgataagcttatttcaatcaatgggcatgacatcacggatattctcgatttccgtttttacgagacgaacacccatctgcatgtggtatacgaaacggcggagggcgagcggcgcgaagagaaattcgtaaagccgcagtacggcgcactgggccttgcgtttgaaacgtatcttatggacaggcagcgctcctgccgcaacaagtgcgtgttctgcttcattgaccagctgccgcccggcatgcgcgaaacgctctattttaaggatgatgatgaccgcctttcgtttttgttcggcaactacatcacgctgacgaacattgatgagcgtgagatcgaccgtatcattgaaatgcgcatcagccctattaatatttccgtgcataccatgaatcccacgctgcgctgcaagatgatgcacaaccgctttgcgggcgacgcgctgcgttttgtgcgcaagctggcggagcacaacatcaagctgaattgtcagatcgtgctgtgcccggggctgaatgacggcgaggagctggaatttacgctttccgaaatgtacgcgctcggcgagagcttacagagcgtcgcctgcgtgccggtcggcgtgacgcgctaccgcgaggggctgtatccgctggagacgtttaacaaggatacggcgcgcgcggcgatcgagattttggagcggtggggcgataaattcaaggcagagcgcggctcgagaaccgtgttcccgagcgacgagttctacctcattgcaaagcgcgagctgccgccgtatgaattctacgaggacttcccgcagattgaaaacggcgtgggtatgctgcgcgacttagaagaagaattttcctgggcggttgaagacgagccggagcgcgacataaaacgccgcgtgacgattccgacgggcgaaggcgtgtatgcgtttatggagcatgtgatggactttgcgcgcgaaaaattcccggggctcgagatcaaccttgtgcctgtgcacaacgatttctttggcggtacggtcaacgtgaccgggctgctcacggggcgtgaccttgtgaaccgcttgagccgcgaaaaccttggcgacgcaattttgcttgcaccgtccatgcttatggcggacgaagatattttcttagacgatatgaccgtgcagcagctcagcgaaaagctgggtgtgccggcttacagaatgcataaagacgccgcaggcgagctcaaggacattttgggcactgcggagtaaggaaaaaagaaggaggaaaaccgtatgtcaagacctattgtagccatcgtgggccgaccgaacgtcggtaaatccacgctgttcaacaagctgatcgggcagcgcctttccatcgtggaggacacgccgggcgtgacgcgtgaccgcattttcggcgagtgtgaatggaaaaacagaaagttttcactggtagatacgggcggcatcgagccggaatcgaaggatattattttgtcccagatgcgcacgcaggcgcagattgccattgattctgcggactgcatcattttcgtgaccgatgtgcgcaccggcatggtcgcaacggacctcaacatcgcacagatgctccagcgcagcaatgtgccggtcatcgtgtgcgtcaataagtgcgatacgctgggcgacccgccggcggatttttatgaattttataacctcggcctcggcgaccccattcaggtgtcttccgtgcacggacacggcacgggcgacctgctggatgccgtcctcgagcatctgccggaggaaaaggaagaggaggacgagggcgagatcatcaaggtcgccgtcatcggcaagccgaacgtcggcaaatcttcccttgtgaaccgcgtttccggtgaaaaccgctgcatcgtttccaacattgcgggtacgacgcgcgacgcggtggataccaccattgaaaacaagtacggcgtatttacgttcatcgatactgccggcctgcgccgcaagagcaaggtggaggattccattgagcattacagcaacctgcgcgccgaaatggcggtggacagggcagacgtgtgcgtcatcctcatcgatgccacggtcggttttacggagcaggactccaaggttgccggcatcgcgcacgaagcgggcaagggctgcatcattgcggtcaacaagtgggacgccgttgaaaaagacgacaaaaccatgcaggaatataagacgaagcttgaaaaggacttttcctttatgtcctacgcgccgatcatctttatctccgcgcagaccggccagcgacttgaccgcttgtttgagctcatccacaaggttgcttccagcaatgcgatgcgcattacgaccggcaccttgaacgacattctggcacaggcaacggcacgcgtacagccgccgaccgataagggcaagcgcctgaagatctactacatgacgcaggcttctaccagaccgcctacgttcatttgctttgtcaattccaaagagcttttccacttctcgtaccagcgctatctggagaaccgcatccgcgagatcttcagtttagagggcacgccggtgcgcatgatcgtgcgcgagcgcggcgataaggcagactgacggggaaggacttgatctacatggaaaatttcggttctttaattttgccgctgctgctttcggcgcttgtggggtatctgcttggcagtatcagctttgccattttgctgaccaaagcgtttgcgcacgaagatgtgcgcgcgcacggcagcggtaacgcgggggcaacgaacgtgctgcgcgtggcaggcaaaaaagcctctgcgctgacgtttctgctcgatttctgcaagtgtgttgcgagcgttttggtcggctattttcttgtaaagcacgcgtgcgttgcaaacggcgtggaccccgaaatggcgcgccttggcatgtatgcggcgggcttttgctgcatgatcggccacatgtacccgctgtacttcggcttccgcggcggcaagggcgttgtgaccacggctgcgatgatgcttttgctcgactggcgcgtgtttctcatttgctttgcggtgttccttctggtgtttctgaaaaagcgcatggtctcgctttcgtctattacggcggcggcgatctatcccgttgtgacgttctgcatgacgtattttgtggactgctgcgtgggcgggctgccggtgctttacgttgtaatggcaacacttgtggcggcactgatcggtgctaccgttatcatcaagcaccgcgcgaatattaagcgcatccgaaacggcacggaatctacgatctcctttaagaaaaagtaagtgtaaagcgcggtacctatacagaaaaaggcgcacaaacggccgggtttggcatttttcgtttacataatcttggaaaaaccttccaaatagcctgtggcttcttgacaatttttccattgtgtattattatgtttactggtcatactatattttgcgatcactttttctttaaatagatgcggcagtgtatgttttgttttagactgccttagttttttgcgcacggcattgggctttttttcgtacccgcgctgtgtagctgcccaatcggcggcagcccgtttcaggaataaatcagtcggtcacggaccggcgggcataacgaaagatcctacttcgtgcagcgcgttgcggcgctgtgtggcggcaggcagtgtgcctttgactgccgaggatatgccgcgcccgcagaaaggaaaattacagtggataaatttatcatcaagggcggaaagcgcctgcacggtgaggttgtcatcagcggcgcgaaaaacgcggctgtggcgatcattccggccgtagccatggcggaatctccctgccgtatagagaacgtaccgaacatttccgatgtgaagctcagtgcacgcatcctgaccgagatgggcgcgactgtgcgctggctcggcaagaataccgtggagatcgacccgaccaccatccacacgaacgtggtgccgagcgagttgggccgcaaaatgcgcggctcttactacaatatcggcgctttgctcggtcgctgctccaaggccattgtaccgcttcccggcggctgcgatttcggcgtgcgccccattgaccaacacatcaagggctttaaggcgctgggctgcacgtacagcctcaacgacggcatgatcgaggtctccgcaaaggagctgcgcggtgcgcacatttaccttgacatggtcaccgtcggtgcaacgatgaatattatccttgcagccgtaaaggcaaagggccttacggttattgagaatgccgcgcgcgaaccgcacgtggtcgatcttgctaacttcttaaactccatgggtgcgaacatcagcggcgccggtacggacgtcatcaagattcgcggcgtggagcatttgaagggcattacgtattcgattattccggatcagattgaagccggcacgtacatggcggctgcggctgcaacgcgcggcgatgtgcttgtgaaaaacgtgacgccgaagcacctggaatccatcacggcgaagctgatggagatgggtgtgacggtcgtggaatatgacgacgcggtgcgcgtgcgctgcgacggcccgctgagtaagtgcaacgtgaaaacaatgccgcacccgggcttcccgacggacatgcagccgcagatcgcggcgctgctctccattgcgcagggcacgagtattttaaacgagagcgtgtgggaaaaccgtttccgctatgtggaagagttgaagcgcatgggcgcacagatcaccgtggagggcaagagcgccattattgagggcgtggaatacctgaagggtgcaccggtgcgtgcgactgacctgcgtgcgggcgcggcgatgatcattgccggtcttgctgcgcatggcgtgacgaagattgaggacattgagcacattcagcgtggctatgaggacattgtggagaagttcgtcggccttggcgcggacatgtatttgatgctcgatcccacaaacagcgataccgcaaagatcggttaaaaccgtatacagaccgtttcgccccgacaaaaccttgtcagggcgttttttatgaaaacagggagggtgcaaatggcagagctttgcccgctgttcagcggcagcacgggaaacagttattatatcggttcaaaatcttcgggcattttggtggatatcggacgcagctgcaagcaagtgacgactgtcatgcagcgctgcggcatagacccgctttccgtgcagggcatcctcattacgcacgagcacagcgaccacatcagcggtctgcgtgtgttcgcttccaaataccatattcccgtgtttgcctctaagggcacgctgggggccttggaatcgatgggaattttaaacgacaaatatcccgcctacacaattgaagacacgttagagctcgccggaatgcacgtaaacgcgttccgcaccccgcatgactgcgcggagagcttcggctaccgcatagaagccgaagacggacacaccgtcactgtcgcgacggacattggacacatcacgccggaggtggaagagaatctgcacggcacagatcttgcggtcatcgaatcgaaccacgatatcggtatgctgcgcacggggccgtacccgtacagcttaaagcggcgcattttatcggacttcgggcatctctcaaacaccgcgtgcgccgacctgctgccggagctttttgaagacggcacaaagcactttttgctggcgcatttgagccgcgagaacaacacgccggacattgcgcggcagaccgccgtctgcggtatgcagatggcgggcgtggagaacgcggaggactacatattgcaggttgcgccgattgaaaacctgaccggcggcgccatcacattttaacatagggagacaatatgctggaggtaaagctgatttgcatcggtaagctcaaagaaaaatattggcgtgacgccgtgcaggaatacgcaaagcgactttccgcattctgccggttccagatcatcgaactgaacgaagcgcgcctgccgcaggatccgaatgcggcggagattgcaaaggcgctcggcgaggaatcgaaggcgattttggcggcggcggggcgcagcgcgctttacacgctgtgcattgagggcaagcttgtctcctccacgcagctcgcgcagcagatcgacgcggcggccgtaaacggggagagcagcttagcgtttgtcattggttcgtcacacgggctggacgacagcgtgaagcagggctcgaagcgcatttccatgtcgccgatgacgtttccgcaccagctggcacgcgttatgctgtgcgagcagctgtaccgcgcgttttccatcaacgcgggcacgaagtaccacaaataatttgaatacgaaaggttgaacgacatgattaagatcgaacgtacaagcgtcatgaattttgaaaacgccatcagaggcgcacgcaaccccatgaacagctggggccgcatggacagccacaccgagccggacggcacgttcgttttcggcgaaaacgacctgagccttgcaaaacgtctgtgcaaggcgggtacggatcaccgcaaattcatccgacagatcttcgtttcggtcgacctcactgcgccgatctactggtggaaggaattcgacacgtataaggtgggcaccgtggcgaactccacgagcacgatgcacaaaattcaggcgaagacgtttgaagaagcggacttcagctgtgaccgtatggtgcccgcggcaaaggagagcctgatgcagaccattggcgtgctggaaaagctgcgcgtggaatttgtggagatgaaggacaaagacctttggtacagcctcattcagcttttgccttcgagctacaaccagatgcgcacctgtaccatgaactacgagaacattgcgaacatgtattttgcgcgccgccaccacaagctggacgagtggcacgtgttctgcgcatgggcagaggagctgccgtattttaagacgctgtttattgaaaacgatgcgtaaaaaggcgtaaaacacagaagatcggtaggtaaaatgcgctgccggtcttctttttatttctaaaatgtgaattttttgaaaaaaactgcctcatcggtagtctttttattccaaatcccttgacaaattgcaaaaataaaaatatactaatattactttcgacaggattagttgaaacaatatgggatatgaaaattgtcaggaggatatagcatgaaaagaaaaaaaccatatatccgtttaacgaattccgaatttgcgatgatgcagctcctttgggaggccggccgtccgttgaatcgcgcagagatcatggagattgcgctgcgtgacccggagaatccgctgtttgcgaagaattctttccacgttatcatcaacaatctgatcggttaccagttcattgcagcgttcatcaatgacggccccggcagaaaaaatgcccgccgcttcgcgcctttgctgacccgcaatgaatatgccggtttgcagattgctacgactgagcactacaaggcttccgatattccggagattgttgccgctatctttaagtacacgaaggacgcggataaggaagagcttctcccgaagattgaagaagctgtgcgccgctgcaagtaaacggaaaacaacatgcgctatgaagacggcaggggttgctctgccgtttttcttttttacaaggaattcgacgggaaaacgcctgaatatacagaattatataattgtatgcaaatttgatataacgcgaagcaaaattgactgaacggatttttatgaaggataacagtcgttgtcacaaaagtacaatcaatgagcttttatattacttgttccagttattgccataaagaaagaagcggagatgccctcagaaaccggagcgtctccgctttttgcatgcaaatagagtttaaagtgtcagtttcatgccgtcgtaggaaatttcgatgtcgtgcggcgcggcaagctccacgagctcgtcatacagaagatgaccgttatgcgagaaatggttcatcacacagtgggtgtatttgtcaacaataccgagtgctttgagctcctccttgaggcgaatgacctccggcgcgcccatgtgcgtgcttttaaagccgcagtcttcatagccgagcgtagtgtcgaagctgaaaagatcggcgggctttttctgcgccttgaggtaatcccacacctctggaaaatagtagccgctgtcgtgcatatagaagacagatttatcctcgcgtgtatcgacaatgtggtacacgaacggctggtgcgaggggttcatgtggtttgcgggcagcggcgttacacggtagggaccggcttccacggtctcaaacggctttaagatgtgccagtgcatggcgctgtcgcttttttcgtcaatttcccaatcggcacagcggcggaaataatcgtaggtctcctgtgcgcagtagatttcaagctcggggctgatcatctcaaggctgtaaacggagccgcgcacggtgagctcctgcgggtagaaatgatccatgtgaaagtgcgtgacgaacagatacttcacacggctgagatcgagattattcatgagcttgtgcatgtaggtatccggcggcaggtcgagcagaagatcgtcgttgacgatagcctgcgagcgtgtgcggatgtttttgccgccgaggcgctgcgcctctaagcaatatttgcagcggcagaatacggcaggccagccctctgcggcggcggtgccaagatattgaaactgcattttgtacctcccaaatcgagaatagacttttctatttgattatacgggcgaaaggacggaaaaacaagggtaattccgtacaagaaaaacgtcgtgcagtaccgcacttagcacaatgaaaaacgcctaaagcgtttcagccttaggcgtttgccggaaaacgaagatatttatgcgtcgatcttcatgtcgccgtccttgacccagccgatcttgcggaagatgaggtcaaagacaaaagaaagcacagccgggagcacgaagcagatgagcacaaggcccagccagtccatagcggtgacggctgttttggcaccggcagcaatgtcgttcagccagccggtataaacgccgatctgccccacaaggccgcaggtacccatgccgctggagatcggtgcgccgttcatctgcatgccgaaaatgcatgtcgcgatggggcccgtcacagcggaagcaagcgtaggcgcaagccagatgcgcgggttcttgatgatgttcggaacctgcagcatggaagtgccgatgccctgcgcaaagaagccgccccagccgttatcgcggaagctgatgaccgcaaagccgatcatctgcgcacagcagcctgcaacggccgcgccgcccgcaaggcccgttaaaccgagcgccgcgcagatggccgcgctggagatcggcagcgtcaatgcaacgccgacgatgacggaaacgagaatgcccatgaggaacggctgctgagtggttgcccacatgataaggttgcccacgctggaagccgccgtgccgatgtacggcgcgaataagtacgcaaggccgcagcccgagaaaatggtgacgagcggcgtgacgatgatgtctaccttcgtctttttgctgacgagcttaccgagctctgccgcgatgatggcgagcacgagcaccgcgagaggaccgcctgcgccgccgagcgtgtttgccgcgccgccgactgcgacgagcgagaacagcacgagcgggggcgcctgcagcgcgtagccgatggcgaccgccatagcgggaccggctgcggactttgcatacccgccaatctcatcgagcagcggaatgttaagctgtgtgccgagcgtggaaatgatggtgccgatgagcagggaagcaaaaagcccctgtgccatggcgctcatggcatcgataaagtagcggtgcagatacaccttgactttgctttcttttttggaagaagttccctccatttttgttcaatcctttctttttacggagcgcgaaaggttctccggcgctcctgggttttacgcaaacgtgcgctgcgcagaatacgcgagaaagaatctatattgactatgttgccgtctgcctctgtccgttttcggaagaacgctgcgccgccgggggattcccgggctatttggtcacagcggccgcgtaatggcggtacatcggcaggcggccgtttgggttacgcgttaaagaataccacaaatttcccctgtttgcaaggcggctgcaaaaagacagagttttccatagtttcctttgcaatcggcggcgaaatatggtatactatattactaatagatttacggcttggaatcgaaggggtgtttatacataagttggctgaaaaggaagaagcaccgtacttagaaaaactggacggcgtgcggttcaaaatggccgcgccgtttgatttctcgtttttgaaacgatacggcaaggtgttcaaggtctatgatgaccaggattccggcaatatttgcttcggtgtgcggaatgaaaacggcaagcgtgtttttgtgaaattcgccggtgcgcctaccgcgcggtacacggggcaaaaggaggatgcaatcgcgagccttaaaaacgtgtccggtttatatcgggcactcacgcacgaaaatctcattcggctcatcgaaagtcgagagatgggcggaggctgggcttcggtgttcgagtggacggacgcgatctgcctcgggcgacagtacccggagcagcatgcggcgtttgtgaaattgcctacggaaacgcgcatgaaggtttacagagacatcttatattttcagagctttgcggcaaaaaaaggctatgtggcggttgatttatacgattcgaccgtgatgtatgatgttgaaaaccggcgaaccgtgctgtgtgacattgatttttaccgtaagatgccgaccgtaaatgatatggggcagatgtgggggagcgcaaggtttatgtcgccggaagaatacgagctcggcgcggtgcttgacgaagtgacgaacgtgtacacgttgggcgcgatggcgtttgcgctgttttcagagtgcgaccgcagcgcggaggcgtggccgctgagctcgaatctgtatgctgtcgcaaagaaagcggtcagcgaggaacgaagtgcgcgctatgaaagcatagatgcgctgttaagtgcgtgggaaaccgcgcgcggagaggagttataaaatggaaaacaaaaagtatgtcatcggcgctgacatcggcggcacgacggtgaagctcggtttatttgagaaagacggcactttgcttgaaaagtgggagattccgaccgtgattgagggcgacggcacggcggtgctgcgtgatattgcggcggaaattcaaaagtgcagagaaaagcacaacattcccgcagacggtattttgggcgtgggcgcgggcatccccgggccggtgacggcggacggtgtggtgcaccgctgcgtgaatctcggctggggcgtatttgatgtgcgcacggcgctggaagagaccgtagggcttccggttgtggtcgtgaacgacgcgaatgctgcggcgatgggtgaagcctggaaaggcggcggccgtggcagtgagaacgtggtattcatcacgctcggcacgggtgtcggcggcgcggtcatttcggatggacgcatggtggcaggcgcaaacggcgcggcgggtgagttcggccacatgacgatcaaccccgcggagacggagacgtgcgcgtgcggccgccgcggctgcgtgcagcagtacgtttcggcctcgggcattgcgagactggcacgaaaataccttgccgaacatgaggaagaaagtgctttgcagagtgtcgagaagctcacaacgaaagacgtgttcgatgccgctaaaaacggagacggcgcggcaaacgcaatcttagagaatgtgtacgatgcgttcggctacaccatctctgccgtgtgcacggtggcagaccccgaggtcgtcgtcatcggcggcggtgtctcgaaagcgggcgagatgctcgtagaaggtgcgaagaaaggcttcttgaaatacgtattttatccgagctccgatgttcggttcaacttggccgtgctcggcaacgacgccggcatttacggctgctgcaagctgcttttggacagccttgcgtgataagaacggaaaggatagggagaaatggataattccaaaacagagctgtttgaatcgatgccaatcccgaaggcggtcgtaacgctttcggtgccgtcggtcatcagctcgcttgtgatggtcatttacagccttgccgatacgttctttgtcggtatgatgaacgacccggtgcagaacgccgctgttacgctggcggcaccgcttctgctggcgttcaatgccgtcaacaacctgttcggcatcggcagctccagcatgatgagccgcgcactcggacgtaaagactacgataccgtgtaccgcagctcggcgttcggattttacgcgtctttgatttgcagcctgctgttttctttgctgtacggtgtattgcagtcgccgattttggtgatgctcggcgcgaatgccgaaacgatgcaggcaacggcggattatttgttctggactgtgctgctcggctccgcgccgtccattttgaatgtcgtgttggcgtaccttgtgcgcgcggagggctcttcgctgcacgcgagcatcggcaccatgtgcggctgcctgctgaacattgtgctggacccgattttcattctgccgtggggcctgaacctcggcgcggcgggcgcgggctgcgcgacctgcctttccaacacggttgcatgcctctacttcttcgtgctgctgttcgtgaagcgcggcaagacgtacgtgtgcatcaagccctccatgttccgcccatcgaaacagattgtcaagggcgtgtgcggcgtgggcatcccggcttccatccagaaccttttgaatgtgaccggcatgactattctcaacaactttacgtccgcgtatggctctgacccggtggcggctatgggcatcgcgcagcgcgtcaacatagtgccgttccagattgcgatgggcttttcgcagggcattatgccgctgatcagttataactacacgagcggcaatatcaaacgcatgaaaaagacgtttatgttcacggcgaaaatttcgcttggctttattttggccgtgatgctgacgttcgtgtttgcggcggagccgatcatctccatgttcatgaagaacgagagcatcgtcgcgtacggcgcggcgttccagcgcggcttctgctttgcgctgccgttcttgtgcatcgatttcctcgcgctgggcgtgttccagtcgtgcggtatgggcatgaaatcgttcatattcgctgttgtgcgcaagatcgtgctggagattcccgcgttgtttgtgctgaattggctgttcccgctgtacggcctcgcgtatgcgcagttcgtcgcagagctgatcctcggcaccatcgccgttgtcgtgcttgtgagaatgttccgcaggctcgaaagagaacatgccgcaccgtatgtgagcgattcggaaagcgtgaagtaacaccgttctgccgggaagcgtggctaaaagttttcgccggcctttagaaatagaatataaagctaaaaaaggaacggtttgtacgccgttcctttttgtatacaccgaaaataacgcttgactttttgctttctatccgttattataaaaatgataattattattattttaatgggaggagcaaaatgaataacaaagcgttttataatttgacatacggcgtgtttttgttggcggcaaaagcggaggaaaaggcgaacgcctgcattgtgaataccggcgtgcaggtcgcggggagccctgtgcgcgtggcggtttccgtgctgaatacgaattacacctgcgcgcttattaaggaaagcgggcggtttacgttgagcgcgttggatgacagctgctcgtttgagaccattaagcacttcggtatgcagagcggtcgcgacgtcgataagctggacagcctgccgatgccgacagacgaaagtggcgtaccgtatctgaactggagcacctgcgcgcggttcagcggcaaggtgacgcacagtgttgacctcggcacgcatacgctgttcattgcagaggtgacggaagccgaggtgtgcagcgaccgcgctccgctgacatatgcggattaccagaataagctgaagccgaaatcggagaaggtcgagcgagagcggaagatcgtcggctggcggtgcaaaatttgcgggtatgtgtatgagggcagcgcgctgccggaggactacgcatgtccgttgtgcgggcacggaacggatgattttgagccggtttatgaagagtaaaggaaaaaggaacggtttgcacgccgttcctttttgcatgtcctattaaaatttacagcgatatttcacgggtgtaaagagcgaacggtgtaaagcccggtgcttccttaccgaatggctttttgcttatctgcaatgcgcaggaagaggaagccgagcgcaaagaacactgcgagacatgccaccgccacgttgatggtgccgcctgcaagctttacggctgcgatgaccgcagagccgaggaaggacgcgccttttgagaaaatgtcgtagatgccgaagtattcgccggagttttccgccggaatgatcttggagtaatacgagcgcgagagcgactggatggaaccctggaagcagccgatgaagaatgccagaatcgcgaagtgcaggaggttactgagcatgagtgcatacagcgcgatgccgaaatagcccgcaatacagacgagaatgagcgtgacggtgttgtattttttcgaaagctttgcgaagacgagcgagccgccgaacgcaacgacctgcgttgcgagcaggaagacgacctgaccgaccgtgttgaggttcaggtctgtgccgatattgatggcgttatcgataatggtgcccacgccgtctatgtacaggaagaatgcgatgaggaagaacagcacctttttgtcgtgcgtcgcgatgtttttgagggtgtggaagatttccgcgaacgccttgcggatatcatgcccctcggtttccacatagttgcgctgcttaaagccgcgaatgagaggaatggtgacgagcagccaccacacggcagtcaccgtgaagccgatgcctttagagagcatatccggcagcacgccgaccatatcgggaccaagcacataggcgatgagcgcgatgaggaacgggatgcacgagccgatgtatccccatgcaaagccgtaggacgaaacctcgtccatgcgttcttcgctggtgatgtcgttcagcatggaatcatagatggtcagcgacgcgctgtaacaaatcttcgtgaacacaaaaatgatgaggaacagcagccagccggtgatgaagccgtttaaaatgcagccgaaaatgccgagcgctgccgcggtggtgaacagcacctttttcttatctttgtggtcggcgagcacgccgaagatcggccctaaaagcgcaacgataacggtgacgaccgccacggcgatggaataatacgccgttgcctgatgcgagttgatctgtcccggcgcagtgccgatggcgaggctcttgaaccagatagggatgagcgagcaggagagcatggtgaacgcggagttgcccacgtcgtagagcacccatgcgaattcctgttccgtcagcccgcggaagaccttgagccggttgagtgcgtgaaaaattgatttcatgtgaagaccttactttctttttaaaatcaggtgcgtgctttcggtcttacattgtagcgccgccctgttaaatccgtgatgtcggtttgtaaaggggaggaaaataattcactcctctttgtccattgtgcccctctaagctttacaaaaattatcactgtgtctattttatcatagatacgaacaaaatgctataaaattatttttgcatcgatagaaattcgggcagaatataatgcaatatacacaaaaagagcggggagaacctcgctctttccgaatttatatgtatggtttatgtatcgaggcgctctaaatcggcgcagatgcggttgatgatctcgtcctgcatcatgtcgggcgtgagggtctgctcgtttaatgcgggggcgtagtccttttcgttccaccatctgcgcatttccttttcgccgaactccgtgcgcttgtccttcgtttggtggcggcggagcgtctcctcaaacgggaggtcaaaatagtacgcgcagatgttttcgccgtagagcgcttttgcggcatcgaaaagcggggtgtaccatcggctgttcaaaatgccttctaaaatgacgagctcgttgtgcgcgtggccgtactcaagcagcataatgagcacgtcgtttgtgcgggtgcccgcgccgtcgttcgtctttaagatgtcgcggcggatgacatcttgggacagcagcatggtgtttttgccgaacttttcctgtaaagcttttgcgatggtcgttttgccgctgccgctgttgccacgcagggtgatgagttttttcatggggtgtgctcctttacgctttttttgatgggatggcgaatgaccgttttccacttttccggcgcgaccttacgggcatcgctgaggtagatctcgtggtgcaggcgcgcggcggtaaagtcgtttatatagccgttttcggcgagaaacgtgtccatcagcgccacagatgcgggctcatcgtcaaacgcgccgtggtgcatgatctgcacgcaaaggccctcgtcgatcgtcaaaaactccgctttgctgcaatcaagctttttcttcttttcggcggtctgcacggcccaggcgaaatcatccggcgtgatgaaatccggcaggcggatgacggagacccagtggaaagcagatttatcggcataatcgatgctgtccgtattctcctgccaccaaaagccctcaagcggcggcacgacatactcgaaaaagccctcgatgcggtggtcggtcttgtagctcattttaagcgtgtaggcgatcgcgtacaaaacgctgatggcctgctgatacgcgccgtccggctcgtttgggtcgccggtgccgcgcactgcaatgtagtttgcaggcggcacagtgacgatctccggcttgtttttcggcatgtagaattctttgtattctttcttaaaatcaaagggcatgggaaaacctcatttcataatattgttacgacccggtggagcggtaatggcgcacgccgaatttccagaagagatagcacgggataataaatacgcaggcgataacgggcaaaagcatcgcgcgggcgtcgttgtggcggccgatgaggtacatcagcgggtaatactgcacgagcgcgtagggcacgatataggtgcagaacgtcagtacgcctttgccgtagatggaaagcgggtagcgcccgtgctcgcgcataccgtctgttaaaatattgatgaactcgagcccctctaatgtgaaaaagcatagcccggcgaagatcaaatacacgcctgcaaaaagcacgatgccgcctaaaatcatgaaaatgaacgtcataacgcgcgcggcgcaccaatcgattgggcagttttgaagcgcccagatcagcaggaaaatcgccataatgcccttgccgaagcgctctaaatccatgcggctgcacaggacgaggaaaacttcgttgcgcgggcgcacaagaacgcggtcgaactcgccgtccccgatcatgcggttaaacgtatcaaacccacggaagaacagctccgcgagcgagaatgataacagcacgatggcgtagcagagcgaaacctcggtgtatgtgaagccgtccacctgcttaaatcgcatgaacatgaactgcacgccccaaaagcatgtgagcggtataaatagctgcgccagtgcggaaagcaagaacgaagccttgtactgcattgctttcttgatgtggatagacaaaaattcaaagtatagtttcatagatgacccctttctttgtatactgcaaaacacgaacgatttgccgggcagcggaacgacttgtcgttccgtttatcctccctgaatcactacccgcttcagcgcatttttcatgagggtgtgaccgccgagcaccaggacgagcagccagaagatttgtaagcctacggcgaaagcggcgttcgtgccggcaatatcgccgctgtacacgcggtacggcacgttgcttgtggcagcgaagggggtcagctcgcagattctgcgcagtgcgggcgggaagaacggcagcggcactacgccgccgcagagaaaatctgccagtgtgaccagcagggagcgcaacccggtggaagaaagggtatacatggtgaggacgtagatgagcagcgtgaacgccgtgctgttcaatgcgcccagcaccatggtgagcaaaaatagaaagaatgtgggtaaatctgtcggcgcggtcaagttatagcctgcgggcagaagcgccgcaacgactaagattggcacggcgcgcaatgcaaccttggaaatacgaccggagagagatttcgtgtaccacatggcgtagaggtcgacggggcggcacagcgaatacgagatgctgccggaggtgatttcctccaaaatgtcgccgtccaagacccacgaggcgaacatagctaaaaacgcctgctgtatccatgtgtagttgacggtcgcctgcaaggtcatcggaaaagcggtggggtcactgcggtaaaacgcgtggtaggcgaagatgatcaaaaagccccacgcaaattgcgtggagatgcctgccaatgccgctgcgcggtactgcaagcccgtcacacagcgcagacggaaaaacgaaatgtattttttaagtttcacggtgcacctcaaatatcaaactgtttgtagagcgccgcgagcgtttcgtcaatctgcccgctgccgccgcgccgaatatcgtcgagtgtgccgtctaataaaatgcgccctttgccgatgagcaggacgcgctgcgccaaggcttccacgtcctgcatgtcgtgcgtcgttaaaatgactgtggtgccgaggcgcttgttcatatcaagcacgaattcgcgaacggcgatcttcgataccgcgtcgagcccgatggtgggttcatccaaaaacaagatgcgcgggtcgtgcagcagggaggcggcgatctcgcaccgcatacgctgcccgagcgacaggctgcgcgccggggtctttaagatctccgataaattcaggaggtcggttaaatcccgtaaatttcgcttgtaaacatcttcggtcacggcgtaaatgtcgcggataagctcgaatgaatcaatgacgggcacatcccaccataattgactgcgctgcccgaacacaacgccgatctgcgaaacatgcgcgcggcggtctttccacggcacgcgcccgtcgatgacgcaggtgccgctgtccggcgttaaaatgccggagagaattttgatggtgctgctttttccggcgccgttcgggccaatatagcccacggcctcgccgtcttcaatacggaacgaaacatcgtttagggcgtgaatttcttcgtactcgcggctgaaaaatgcttttgcggcatttttaaagcctgcgtttcgttttcgcacgcggaaggtcttttgtaaatgttctgcctgaatcatagtttactcctcttttccgttaacggtacggactttcgggctaaagcgaacacagaaactgaaacacgggctatcagtttaatacaatttttataaaatgtcaataatttgcacaaaaaaaatgaaattctattacaaaaagtgaaattatggcgaagacgctttttttcggtatctttatatataaacaggaatttggcactgtggagccggaaatgctaaaagaagcttcaaaacggatgccgaccgggaaaattcgcacattcacaaagtatttacaaattttggtgttgacatttcctgacctttgcagtatagtatagacaagggttagcactcggaaacatagagtgctaaaacctgagaggtgcaagtatggaactgacaaaacgcaaacaaaatatacttgcctcgatcgtagacggatacattcgcacgggcgagccggtgggctccaagtccattgcggaaaaagcaggtgtttcttccgcaacggtgcgcaacgagatggcagagcttacggagctggggcttttagaacagccgcacacctccgcggggcgtgtgccttcacaggagggctaccgcgagttcgtagatgcgctgatgcagccgaaaacgttaacggaagccgaaaagcttacgatagacgcgatgcttgcaaagagcgcgtttgacccggaacgattattgcgtggcgcggcgaaaacgctggcgacttctacacggtaccttgcgttgagtaccacgccgagcggcgcggatgcaaagatcaaggcggtgcagttcgtgcagacgagccgccgcaccgcaatgctcattatgatgagcagcgcaggtaccatgaaaaacaaggtgtttcactgcgactttgatctttcaaacgagattatgcgcattttcttccgcgtgctcaacgagcgcgtgacagggcgcgacgtggcggagatcaaccgggcatttgtgcaaaaccttgcgatctcgctgggtgatatggcaattttgatgtcgccggcgctggcggcacttttggaagtggcgcttgaaacgatgcagacggaaatttccgtaagcggtcagatgaacctgctgttctacccggaatacaagcttggcggggcacgccgggtgatggatattctggaaagacgggagcttttgacagaacttctcgcaggcaagcagaaccgcacgcagatcaagatcggcacagagaccgggcagaacgccttggcggaatcgtcggtcatttgctcacggtacagcgtgaacggcagagatgccggcgcggtcgccgtgatcggtccgatgcggatgcagtacgcacacgtcgcggcacaaacagcatacgtcgcagatcgtgtaggcgaaatgcttacgcgcatcatgcgggaagaatagagaaaggagcgttgccagatggcagaggaaaagaagcctgttcaggaacccgagcaggaagcgaataccgagccggcagaggaatctgcaaaggctgcggaaaaggagaaaaagaaaaagaagagcgagaagattccgaaagaggattacgaccgcttgcaggcggagtttgacagccacaagcagcagcacctgcgcgtgcttgccgagtacgataacttccgcaagcgttccgcaaacgaaaagaacgccgtttacaataacgccgtttccgatacaatcaacgcgattttgccggtggccgataatatcgaccgtgcactggcacaggaaaatgtctccgcagaggatatgaaaaaaggcgttgagatgattgcaagccaatttaaggcgagctttgaaaagcttggcatccgagaagtcggtcaggttggcgagccgtttgacccggcgctgcacaacgcggtggcgcacattgaaagcgacgagcttggcgaaaacgtcatttcggcggtgttccagaagggctacatgctgggcgataaggtcgtaagacacgccatggtacaggtagcaaactaaatcagcaaatatccatttatatagtaattcagaattcacacactcatttgagttaaaggaaggtaattgatatggcaaagacaattggtattgaccttggtacaacaaactcttgcgtagcggttattgaaggcggcgagccggtcgttatcgcaaacgcagaaggcgcaagaaccaccccgtctgtcgtggcattctccaagacaggcgagcgcatggtcggtcaggtcgcaaagcgtcaggcgattacgaacccggaccgcacgatctcctctattaagagagagatgggcacagaccacaaggtgacgatcgacggtaagagctataccccgcaggagatttccgcaatgattctccagaagctgaagggcgacgcggaagcttacctcggcgagagcgttacgagcgcagttatcaccgttccggcgtacttcacggacgcacagcgtcaggcaacgaaggacgcgggcaagatcgcgggcctcgatgtaaagcgtattatcaacgagccgacggcagcagcactgtcctacggtatcgataaggaagacgaccagaagattatggtttatgacctcggcggcggtacgttcgatgtttccatcattgagatgggcgacggcgtgcaggaggttctggctacggccggtaacaaccgccttggcggcgatgactttgataagcgcgtcatggactggattgtcaacagcttcaaggtttccgacggcatcgacctttccggcgataagatggctatgcagcgtattaaggaagcggcagagaaggcaaaaatcgagctttccggcatgacgagcgcttccatcaacctgccgttcatcacggcggatgcgaccggcccgaagcaccttgacctcacgctctccagagcaaagttcaatgagctcaccgcagacctcgttgagaagaccatgggcccggttcgtcaggcactgagcgactccggcctctctatcggtgagatcaacaaggttctcatggtcggcggttcctccagaattccggctgttcaggaagcggttaagaagcttatcggcaaagagccgttcaagggcatcaacccggacgaatgcgttgcaatcggcgccgcacttcaggcaggcgttctcggcggcgaagttcagggcttgctgttgcttgacgttactccgctttctctcggtgttgagaccatgggcggcgtgatgacgaagatcatcgacagaaacaccactatcccgaccaagaagagccagattttctccacggcggctgacggtcagacgcaggttgaggtcaacgttctgcagggcgagcgtgaatttgcacgcgataacaagcagctgggtctctttaagctcgacggcatcgctccggctccgcgcggcatcccccagattgaagttacatttgacatcgacgcaaacggaatcgtaaatgtttccgctaaggatctcggcaccggtaaggagcagcacatcacgatttcttcttcctccaacatgagcaaggaagacatcgataaggctgttaaggcggctgagcagtttgcagaggaagacaagaagcgccgtgaagaggttgagacgaagaacaacgcagagaacctctgctaccaggcggagaagctcgtaaacgagagcggcgacaagctggaagaggcggacaagaccgaagtgaacaacaaggttgcagccctgaagaccaccatgcagaacggcacggtcgaggagatcaagtccggcatggatgagctgcagaaggcgatttacgcggtcagcgagaagctgtataaggcaagtgcaccgcagcagggcgagcaggcagccccgggcgcaaacccgcagcagggcggccagaacccgaacggtgacgtctacgacgcagactacaaggacgtcgattaagttttataaatgacacgttcaaaagtgcaaggggagccgaaaggcgtcccttgccttttggagtttgcgaggagatgacagcggatggcggacaacaaaagagattattatgaagtgcttggggtcgataagagcgcatcagacgatgtgattaaaaaggcataccgcaagcttgcaaagcaataccacccggacttgaatcccggagataaaaatgcggaagcgaagtttaaggaagtcaacgaagcgtatgaggtactttctgataaagacaagaaggcgcgctacgaccagttcggctttgcgggcgtagacccgaacttcggcggcggcgcgggcggcggaaatccgtatgccggcggcgcaggcggttttgattttaccgatattttcgacagcttcttcggcggcggtttcgggggcggcggacgccgtgcgaacccgaacgcaccgcgccgcggcagtgacgtagaggcaagcgtcaccctttcgtttgaggaagcggcaaagggctgcaagaaaaatgtgacctaccaccagatcgaaaattgcccggactgcaacggctccggcgcggctaagggcacaagccccaagacttgcccgaactgcggcggctccggccaggtgcgcatcaaccagcgcacaccgttcggcgtggtgcagtccacaagcacgtgcgaccgctgccacggcagaggccagattgtcgataccccatgcaaaacgtgcgacggcaagggcaagatccgccgccagaagacgatcgagatttccgttccggcgggtatcgatgacgatcagattctgaatgtcggcggcaagggcaatgccggctccaacggcggtccgaacggcgatctgcacgtatacattacagttcgtccgcatgccattttcacgcgccgcggtaacgacgtttggtgcgatatgccaatcacgttcacgcaggctgcactcggcgcggaagtcacggtgccgacgctcgacggtaaggtgagctataccgtacacgagggtacgcagccgggcgacgtgttcaagctcaagggcaagggtattcagagcatcaacggcagaggacgcggcgaccagtacgtgcgcgtaaccgttgaagtgccgaaaaacctgagcaagcgccaaaaagagcttttgcaggaatttgaacagaatgccgacgaaaagaactatcagaagcgtaaaagcttcttcggcaagatcaaagacctgtttgaagactaaacacatgaaagtttaaagtatcctccgttctgtacagagcgggggatattttgctatataagctctttacattttcaactttgcgctcgttgtgcagcttggtatcggcattttggcgctgcccgacaattttcgtgcattttttgttgcaattcggtgcgtttcggactataataaatagcagaaatcaacaaatggaggttgataaaattgaaaaagagaatatttgcgttgtgcagcgccttgctgctcagcctgactgtgttcgcgggctgcggctcgaaaccgacggaggagagcgccgcaagcgagccggaagcaactgccacggctgctccgacggcagaggcggaatcttccgcagcagagagcaccgcagaacccacggaagcaccttccacggaaccggcgaatgtgaacctgctcaccggcctgccgaccttgacggacggcgccatcggcaaacgtcctgtcgccgtaatggtgaataacgtagacgccgccctgccgcaatatggcatctccgccgcagatcttatttttgagttaccggtggaatacgacctgacccgtttgatggcggtgtacggcgactacacgcaggtgccggacgtgtgttcggtgcgcagctgccgatactattatccgattttggcggtcgggtttgatgcggtttacgtgcattggggaattgacccgaccattgcgacggagacaatcaatagcatggagattgatcatttcgatgcagactattacggtacaggcaagtattttggccgtgataaggatcgtatcaatgcgggctacgcctgggagcataccggtgtgttctacggtacaaaggtgccggaaatgctggaagatagcaatgttcgtaccgatttgaaggaagataagatgggcacagcgtttaagttcgttgagatggacaaaaatgctgctccgagcggagaggatgcaaaaaacatccgtgttgactttggcgcgaattacagcacattcagctatgatgcagacaagcatgtgtacatgaaaaactaccagaacaagccgcacatggactgcaaaacaaacgagcagctgcaatttgagaatgttatcgttttggaagcggacatttccctgcgtccgaacgatgttgatggccacaagcttatcaactgggaaggcggcgaaaatgcaaagggctactatatttccgagggcaaaatggtgccgattacttggtctaaggccggtatgtatgacccgctgaagttctttgacgcgaacggcaacgagttgcagctcaatcgcggcaagtcctacattgcgttcacctatgcgggaaactgcaaggttgaagggtaaaagttaagaaaacagacaaaaagagctatctgacttctctaacagaaatcagatagctctttattcttggataatctaaaatgttgtcattttgttgtcacggggaaattctgtaacccaaaagtccagcattttcaaggctttttggcctttcgggtattactcaaattcgatcgttgccgggggtttgccggtgcagtcgtaaaggacgcggttgacgtgctggacctcgttgacgatgcggctggtgacggtttggagcaggccccacggaatctcggcggcttcggccgtcatgaaatcggtggtggtcacggcgcgcagggccacggcatagtcgtaggtgcgctcatcgcccataacgcccacactgcgcatgttggtcagcgcggcgtagtactggctgatgctcttatcgagaccggcttttgcgatctcctcgcgccagatggcgtcggcttcctgcaccatcttgaccttatccggcgtgacttcgccgatgatgcggatggcaaggccggggccggggaacggctggcggctgacgaggtattccggcagacccaactcacggccggcctgacgtgtctcgtccttaaagaggtcacgcagcggctcgacgatctccttgaaatcgacgtaatccggcagaccgcctacgttgtggtgcgacttgatgacggtgctttcgccgccgaggccgctttccacgacgtcggggtagatggtgccctgcgcgaggaaatcgacggcgccaatcttctttgcttcttcttcaaagacgcgaatgaactcttcgccgatgatcttgcgctttttctccggctcagatacgccggcgagcttatcgtagaagcgctggcgagcgttgacgcagacgaaattgagctcgaactggccgttcgggccgaagacctcgcagacttcttccatctcgttcttgcgcagcaggccgtggtcgacgaatacgcaggtgagctgcttgccgacggctttagagagcatggctgccgcaacggaggaatcgacaccgccggaaagggcgcacagcactttgccgtcgccaatcttctcacgcagcgccttgacgctcgtctcgacgaaggagcccatttcccagtcgcccttgcagccgcagacgttgtagacaaagttgtgcagcatcgtcttgccttccggcgtgtggagcacttccgggtggaactggaagccgtagaggttcttttccggcagctcgatggcggcgaccgggcagttatcggtatacgcggagattgtgaagcctgtgggcgcggtctcggcgtagtcgttgtggctcatccagcaaatggtctccgggctgacgttcttaaagaccttggacttggtatcgacgtgaaccagcgttttgccgtattcacgctccggcgccttgcagacatgaccgccgagcagatgcgtcatgagctggaagccgtagcaaagtccgagcacggggataccgagatcgaaaatcgcgggatcaatggtcggcgcaccgtcgacgtaaacgctgttcgggccgccggtgaagatgatgcccttggggttctgtgcgcgaatggcgtcaagacccacgcggtaggacacgatctcgcagtatacattgcactcacggacgcggcgtgcgaccagttggttatactgtccgccgaagtctaccacgagcactttttcgttttgtggcatattacaccctgccttcctgaatttaaaacgttggtttaacgattgaatacagttctattttactccactgtgacggattttgcaagattgcgcggcttatcaatatcgcagcccttcatggaggcgacatagtacgcaaacagctgcattgggatgactgagagggaggggagcatgaacgatgcggtcttcggaatgtagaacaccatatccgtctgcccggcaatctcttttttgtcttccgtcgcaacacccagcacgacagcgccgcgcgccttgacctctttgatattcgacatcattttatcaaagaggcgggcgtcggtcgcaagcgcgatgacaagcgtgccgtcttcgatgagggagatcgggccgtgcttgagctcgcccgcggcgtaggcctcggagtgaatgtaggaaatctccttgagtttgagggaagcctccagagacgcggcataatcgacattgcggccgatgaagtacatgtcgctcgcgttgaaatacttggaagcaaagaactgaatattctccttgtgcttcagcatttcgtcaatctgctccggcagcttttcgagcgccgcgatgtatgcactgagctgctcctgcgtgaatttgccgagctgctcgccgatgtacagcgccagaagataaatgaccgcaagctgcgtgctgtatgcttttgtggacgcgacggaaatttccgggcctgcccacgtatacagcacgtcgtccgattcggttgcaatggtgctgccgacaacgttcacgacggagagcacacgacagcccgcacgcttcgcttcgcgcagcgccgccagcgtatcggcggtctcgccggactggctgatgatgatcatgagcgtgttttcgttgaggatcgggtcacggtaacggaactcagatgcaacatccacttcgaccgggatgcgcagcagttcttcaaacgcgtactttgccacgacgcccacgtggtacgccgtgccacacgccacgatgttgatttttgtgaagcggcgcagctcctcagcggtcaaggtgatgtcatcaagcacgatgtgcccgttgcggatacgcggtgtaatggtatcacgcacggctttcggctgctcgaagatctccttcatcatgaaatgctcaaagccgcccttttcggccgcttcaatatcccactcgatgtgctcgatctctttttcgaccggctcgccgtctgcgttatagaacttcacgccgtcgcgggtgagctctgcaatttcgttatcttttaagcggcaaatctcacgcgtctttgataagatcgcgggaatgtcggacgcgatgaaattttcgccctgcccgatgccgatgatgagcgggctgtccttgcgtaccgcgtagatgcagtccgggtggtcggcactgatgatgccgagcgcatagctgccctccaccttggagatgaccttttcaatcgtctccagaatgtcgcccttatcgtagtattcgagcatctgcgcgacaacctccgtatcggtttccgatacgaactgtacgccgcggcgcatgaggtgctgcttgaggtagagataattctcgatgatgccgttatgcacaacggcaaaacgaccgccctcgctcacctgcgggtgcgagttcacatcgctcggtgcgccgtgcgtcgcccagcgcgtgtggccgatgccgagcgtaccggtcagtgctttgccgccgtccaacaggtcgctcagcacgcgcagccgacctttcgattttacaactttcaatccgtcttccgagaagaccgctacacctgcggagtcatatccgcggtattccaacttttccaacccctgcaagagaacgggtactgcctgatcgttaccgatataaccgacgattccgcacatatcctaaaccatcctttcagaatttacaattcaaaattggttattctctgtacagtgaaaatataaccgtattcaactatttgtatgcaaagtaggggaaagcaggcggctttgggctgcctgctttcttagaatatcttaaattagcgatacatgatgtcttcgcgggcagggccgttcgagaccatgcagaccggaacaccgaggtgcttttcggcaaactcgacgtaatgacgtgcgttctccgggagatcctcgaacttcttgatgccgcggatgtcgcatttccaacccggaagcttctcgagaatcggcttgcagcgcttgagctccgtagtggtcgggaagtaatcaatctgcttgccgtcgagctcgtagccgacgcagaccggaatctcatcgagatagccgagtgcatcaagtacggtcatggcaacgccggttgcgccctgcacctggcacccatagcgggctgcaacgaggtcgagccagccgacacgacgcggacggccggtggtagcaccgtactcgcccttatcgccgccgcgctttctcagctcttccgcttcatcgccgaaaatctcggaaacgaactcgcctgcgccgacagcgctggaatacgccttaacgaccgtgtaaatctctttgatctcatacggcgggatgccgcctgcgccgacagcgccgaagccggcgaccggggaggaggaggtgaccatcggataaatgccgaggtccgggtccttcagggagccgagctgaccctcgagcagaatggttttgccttccttaacggcgttgtggagaatggtgaatgtatcggccacatacggcgcgatgagttccttgtactccatgagctttgcgtaaatctcttcgcggtcgagcggctctaccttataaagttcggtgtagagtacattcttgaggtcgagcacatggtcaatcttctccatcaggtcctctttgctgccaaacagctcgctgacctgaaagccgatctttgcgtacttatcggaatagaacggtgcgatgccgctcttggtggaaccaaaggacttagaagccagacgggcttcttccatgccgtccagtgctttgtggtacggcataacgatctggcagcggttggagatgaggatgttcggcatcggaacgccctgttccgttacagccttgagctcgtcgatgaagttttcaacggagagcgcaacgccgttgccaatgatattgaggatgttttttctaaaaataccggagggcagctgatgcagagcaaagcgaccgtaattgttgatgatcgtgtgaccggcgttgctgccgccctggaaacgaacaacgatatcggaatcttccgccagaatatcggtgattttgccttttccttcgtcgccccagcaggcgccgacgattgcttttaccataatagttcaagcctttctaaatatatatttatttcctcccaaagccgtttaaaacggcggggtgaattacagattgatctctgcggtctctgtttcggtgtctgcatagcgatcgaggatcggctttacgacatcgttaaggaaaatttcggtctggcgcggtgcgcggccgacatacttgtgcgggtctacgatgcccttgagctcatcgagcgtgacgccgaagatcgggtcgtttgcgatgcgctccagaaggtcgttttcaccgccctcttccttgatgaccttagaggctgccatggagtgcacgcgcacgtgctcgtgcagctcctgacggtctgcgccgcgctttgcggcgtccatcatgatgttttccgtcgccatgaacggcagctcgcggcgaaggtgctgctcgatgaccttcgggtaaaccacaaggccgtccgcaacgttcattacaaggttcaggatcgcgtcggtcgcaaggaaagcttccggcacgctgatgcgcttgttcgcggagtcgtccagcgtgcgctcaaaccactgcgtagaagcggtaatcgccgggttcagcgcgtctacgacaatgtagcgtgcaagggaggcgatacgctcgctgcgcatcgggttgcgcttatacgccatggcggaggaaccgatctggttcttctcaaacggctcttccacttccttcaggtgctgcagaagacggatgtcgttcgagaattttgcggcgctctgcgcgatgcagctcaaaacattcagcatctggctgtcaagcttacgcgggtaggtctggccggagacggcaaagcagctctcatagcccattttctcggcgatcttcgcgtcaatctttgcggccatttcatcgttgccgtcgaaaagctcaaggaagcttgcctgtgtgcccgtggtgcccttggagccgagcagcttcgctttgctgagctgatactccacgtcttcaaggtccatcagaaactcctgcatccacagcgtggcgcgcttgcccacggtggtcggctgtgccggctggaagtgggtgaaggcaagcgtgggcaggtctttatattcttccgcaaaatgggaaagaatgcggatgacattgacgagcttcttcctaacaatcatcatggcttccgtcatgatgatgatgtcggtgttgtcgccgacatagcagcttgttgcgccgaggtggatgatgccggcagccttcgggcactgttggccgtaggcatacacatggctcatcacgtcgtggcgcacaaggcgctcgcgctcttcggcgacttcatagttgatgtcctcggcgtgtgccttcagctcatcgacctgttcctgcgtgaccggcagaccgagctccatttcgctctctgcaagggcgatccaaaggcggcgccaggtcttgaacttcatgtccggcgaaaacaggtacttcatctctttgtcggcatagcgggaggacaggggggattcatacgtatctctcatgtttatcttttcctttaatctaataaataacaaacggtaaataacaaacggagaatgcggcaataaaccgcgtaaacggagcctccgcgttttcggggactccgtttcgttatatgctttacagtcagttcaggccgatgcgcttcatcatttcggcataagcctcttccacaccgcccatgtcgcggcggaaacggtccttatcgagcttttcatgggtgttgatgtcccagaagcggcaggtatccggggaaatctcgtctgcgaggataatctcgccgtcggaggtcttgccgaattcaatcttgaagtcgatgaggtcaacgccgatgctcttgaagaactccagcatgagctcgttgaccttcagagccatcgagctgatcttatcaatctcctcctgcgttgcaaagccagcagcgaggatatggtaattgttgaccatcgggtcgccgagatcgtcgttcttgtagcagaactccaggaccggtacgcgcatgggggtgccttcctcaaggccgaggcgcttagagagactgccggctgccttgttgcggacgatgacttcgagcggaacgatgctgaccttgcgcacgacggtgtcgcggtcggaaagctcttctacaaagtgggtcttgatgccgtgcttttcaagcagctggaacatgaagttggacatacggttgttgacaacgcctttgccgacgatggtgcccttcttgaggccgttgaacgcggtcgcgtcatctttataggaaacgatgcaataatccgggttctccgttgcgtaaactttctttgctttgccctcatagagtaattcggtcttctgcataatacattaccatacctttcttcattgagcgtttggcgcgggcgaaaagccgaaaacggcaaaattttctcccgtgcattatcatacactttaattctatagaaaagtgcaccgaatgtcaatctttttccgaaaaccgccgtgcaagaattcgtacaatttcagggtatgagacgaaagaatactggtgcttttacaacaaaagaaagtaaacttgcagaattgaaataggtttccttcaaaattcatcgctttgcggtgctgaaacttttttgaaatttttcgcaaaaacatattgaaaacacgaaaaacctatggtaaaatgtaagcgttttcaggaaacgggcaaaaaggcccaaaagaccgaagggagatctttttgcaggatttaaaggtaaaaactgcgtttcctgtgcttttcttatttttcaatctattttctaaggagcgatcgttatgtcttatgtaagcgaacagctggaacaccttaaaaagcttaattccaatgagccggaattcattcaggctgcaacggaggttctcaccactttggagccggtcattgaagcaaacccgcagtatgaagctgccggtatcttggagcgtctcaccgagccggagcgccagattatgttccgcgtgccgtgggttgacgataacggcaaggttcatgtgaaccgcggctaccgcgtacagttcaactctgcgatcggtccgtataagggcggtctgcgtctgcacccgtccgttaaccttggtatcatcaagttcctcggcttcgagcagattcttaagaactccctgaccggtctgcccatcggcggcggcaagggtggctccgatttcgacccgaagggcaagagcgaccatgagatcatggtgttctgccagagcttcatgaccgagctttacagacacatcggcgctgataccgacgtaccggcaggcgatatcggcgtgggcggcagagaaatcggctacctctacggccagtataagagaatccgtaactgctatgagggcgttctcaccggcaagggtctcacctacggcggctccctcgcccgtacggaagcgacgggctacggcctgctgtacttcaccgatgcgatgatgaagaagaacggtatggatattaagggcaagacagtcgttatctccggcgccggcaacgttgcaatttatgcaaccgaaaaggcacagcagctcggcgctaaggttgttaccatgtcggattccaccggttggatctacgacgcggagggcatcgacctcgcagctgtcaaggagatcaaggaagttaagcgcgcacgtctcaccgagtacaagaagtacagaccgaacagcgagtaccacgagggtaagggcgtttggacggttccgtgcgacgtggctctgccgtgcgcaacgcagaacgagctgaacgaagaagacgcgaagacgctcgtcaagaacggcgtacaggtcgttgccgagggcgcgaacatgccgtccaccattgaggctacgaatgtcttccagcaggccggcgttctgtttgcaccgggcaaggctgcaaacgcaggcggcgttgcgacttctgctcttgagatgagccagaacagcgagcgtctctcctggagctttgaagaagttgacgcaaagctgaagggcatcatggagaacatctttgcgaacgtagacgcggctgccgagaagtacggccacccgaagaattatgtcatgggcgcaaacatcgcgggcttcgtgaaggtcgcagatgctatgctcgcacagggcattgtctgatcctgatttgatttaaaacagaataaagcttaaaaggcgctgtgtggtttaaaacctgcacggcgccttttgtttattaaggaagtcattctaaacgatggaggatggaataacacaaacaaaatttttcacagcgggatgaaaaagtaaatacggaaaataaaaaatggacaccgaaacgatgtccataattttatcgaccagttcttttatactgctcttgtaaccttgccggaacgcaagcagcgggtgcaggcgtatacacgcttcggtgtaccgttaacaagtgcctttactcgtctgatattcggtttccaagttctgttggaacgtctgtgggagtgggaaaccttgatgccgaaggatacgtcctttccgcaaatttcacatttagccatctatctgcacctccttaaagtgcctaattcttcattgcaacgttagtattgtagcagaaacgaacgcaaaatgcaagatttatttttaaaaatgggaactaaattttgaaaaaactcgcttttccgcatcttttgctaaaacgagaagttgttcacagaatgtttttacggaaaagaattgttttttcgtcctctatgctttataattctataaggtatatccgaaaccgttttcgggtgcaccccacagaaagaggtgttatatttgctttttaattcaatcatgaccttgctgcgcggcggctctgttgatccgctcagtgttatcattcagattttagccacgctcgtcatcgttttccttgcgctgccgctgcacgagcttgcgcacggttgggtggcgtacaaactcggtgaccctaccgcaaagtatgagggtcgcttgacgctgaacccgcttgcaagcattgacccgatgggtgcgatgttccttttgcttttcggcatcggttgggcaaagcccgtgccgatcgacagccggtatttcaaaaatccgcgctccggcgtggcactcacgtcccttgcgggcccggcggcgaacctgcttgcatcttatgtcggctgcgttatttattatgctattgcggcttttgcgccgtacaacgcgtttgtgcattacattttactgttcttcagctatttttcgtttatcaacgcggtgctggcggtcttcaaccttgtgccgctgccgccgcttgacggctccaaaattttggcggcgctgctcagcgaccgcgcacgctacaagttctaccagtaccagaacatgctctccatgatcggcatgctgctcattgtttccggtgcgctcacgggtccgctgagtgtgcttgaaaacgccgtatacggcggtgtgagctggcttgcggcgttgccgttccgactggccggcgtattgtgatcgtgtatgaacatggaaaaaacggaaacactttcctataagctcgatgtgtttgagggtccgctcgacctgctgctcaacctcatcgcaaaaaacaaactcaatatctacgatattcccatcgcagagcttttagagcagtacatggcgcagattcacgagatgcaggcggcagatatggacgttgcgagcgaatttcttgagatggcggcgcgtcttgtgcacatcaaaagtgtttcgctgctgccgaaaaaggaagaggaagcggcattgaagcaagagctgaccggtcagctgcttgaatatcagcagtgcaaggaagcagccatgcgtctgcgcgagcggttttcgctcgacggcatcgtgcgtgcgcaggcggatattcccgcagatctcacttataagcgccatcataagccgcaggagctgctttcggcgtatttgtcgatgctcggcaaaaagaagccgccggagccgcagaagccggaggacaccatctcaaagctcatcacgcgccgtgtggtctccgtggcttcgcaaattgttttcgtgctgcgcagcctgtggaaaaagcggcatgtgtcgttaaaagggctgttccgcggcaaaaacgacccctcggagcgtgtggcggcgttcctcgccgttttggagcttgtcaaggacaagcgattgcgcgtggacggtgacggcgaagactgcgagatcaaactgacgaacggaggcgagtaagctgaataaaaagaaaatgctcggcatgatggaggcaatcttattcgcgtgcggcgacccgatcgacatcgataagctggcgcaggcgcttaacaccgaggaagagaacgttctggagctcagccgaacgcttcaggcgaaatataacaaggaagaaagcggcatccatttgctgcaattagaccacaccttgcagtttgccgtgaatcccgcgtttttggcaccggtgcgcacagcgttagacctcagaagcagcgcgccgctctcgcaggcggccatggaggtgctggcggtcatcgcatataatcagcctgtcacgaaagcgtttgtggagcaggtgcgcggcgtggattgctcgggcgtcatcggcagcctggtccagaaggcgctcattgaagagcgcgggcgactcgaccttcccggtaagccgctattatacggcacgacggaaaatttcctgcgctgcatgggcatccgctcgcttttggagctgccgcctttgccgcaggaggaagaagccgaaaacgcacctcaaaacgacggggcagacaaagcatgatcgttttatggattctgctcgggctcatcgcgctgatctttcttctgctgtgcatccctgtgcggttcgatctgaactataacggagaggcgaccgtttttatacggtatctctttttaaaataccgcgtgcttcccgcaccggagaaaaaaccggagccgaaaaaagagaagaaaccaagcgaaaaaaagtctgaagaaaaagccaaggagaaaaaaccgaacccgcttttgcagcaggtgaaaaaatataaggaagccgagggacttacggggcttttaacgctcgcgaaagatttgttaaaggccaccggcacgcgctttggaaagcttttaaagcacataaagctgaaagatttcgacctatacgtgctcgtcggcggcgggaaagatgccgccgaaattgctatcctgtacggagaggtgtgtgcgggcgtctacccggctgtgtcggtcttgctcggcttaacaaactgcaagtcgccgcatggacgtgtttccgtcgatctcgattacagcgtaaaggaaccgaaggttttatgtacggcaagcggcgcggtgcgtccgttgttcgtcgtgcaccacggggtgcagtttatactgcgcacgatattgccgttttacaataaatttcaaagtgccggaaagcctgccgtaaaatccgcagcgccggcagcaaataaaaaggagagaacaacatgagtgaaaataaggtcaacaacctgctcggcgtttccatggataaaatcaaggaaatggtggacgttaacaccgttatcggcgatcccatcaccgcgccggacggcactacggtcatcccggtttcgcgtgtgagctacggctttgcaggcggcggctccgacctgccttctaaagcgcagccggaaaagggcctctttgccggcggcagcggcgcgggcattaccattcagcctattgcgtttttggtaatctcgaacggcaatgtgcgcattttgcagattgagccgtatgtttcgtctgtcgatcgcgttgtggcgagtgtgccggacgtagtggacaagatcgccggacttttcaacaaggataagaaagacaaagaggacgaggatatttccctgcccccgcagtattgatcgtataatccagccgcctgccgcgtatacatgccgtggcaggtggtgatttttgcgaaaaatactttgtgttttgctggcggttgtttttgtgtggggcagtctgcctgtttcggcagagacggcggagtccgtaagcgtttcggcgtatgccgccgtactgtatgagcccgtgagcggcacggtcttatttgaaaagaacagccgcgaggtactgcccgttgcgagcacgacgaaaatcatgacggcgctgttggcatttgaaagtgagcataggggtgatcccgtgacgatcatgccggaaatgataagcgtggagggctcctctatggggctgcgcgccggggaggtgcttgcactcggcgacatcgcccgcggcatgatgatggcctccggcaacgatggtgcgaatgcgatagcgctgtatctgtccgattcgacggaagcattttccgagaaaatgaacgcgcgcgccgcagagcttcatatgatgcagacgcatttcgtcacgccctcggggctcgatgccgaggggcacggctccacggcgtatgacatggcgctgcttgccgcagaagcgatgcaaaatgaagagtttgccgcggcggtggggcagacgacgctttccgtgccgtttatttcgcccgaaaaaaccgtgcggtatgaaaatcacaatcgtttactaaagctgtacccggactgcacgggcatcaaaacgggctttacgaaaaaggccgggcgctgccttgtgtcttccgcagagcgggacggcgcacggctcatttgtgtgacattaaatgccccggacgactggaacgaccacatgaatttgtacgattacggctttgcacagcttgcagagcgaacatatacggcgggttttcagccgatttcgcttcccgttgtcggtggtgaaaaagagtgcataagtctcacgctccaaacgcaggaaagcgccgttttgccgaaagatgtggcggtcacggcggggtgcattctgccgcaatttgtgtatgcgccggtagaaaaaggcgacgtaatcggctgcgtgcgatacagcgtgaacggcaaggttctaaaggaaacaccgcttgtttcaagcgaagattgtgctttgcaaaaggacgaacgcacgtggcttcaaaagtggttcgcccgctttttgagaagcacaagctttataaattgagagatacagagaaaggttttgaactatggctaaagatacaagactgcaaaagatgcttgcggagtgcggcatcgcttcgcgccgcaaggcagaggagatgatcgcagcggggcgcgttgcggtcaacggcgtccgcgcgcagatcggcgacaaggtggacgtgaagaaagacaaggttaccgtagacggtcagcgcgtgcagaccgtggacgaaaaggtgtacataatggtgcataagccgcgcggctatttgacctccatgtccgacgaccgcggcagaaagtgcgtcagcgagcttgtggaggagctgcctgtgagattattccccatcggccgtctcgataaagactccgagggcttgctgctcatgacaaacgacggcgattttgcaaatctcatcgcgcacccgtctacacatgtgccgaaggtgtaccgtgttacggtgcgccccggcgtaacggaagaacagctgacgcgccttgcggtcggtgtggaaatcgacggcagaatgaccgccccggcttccgtgcgtgttttggagcagcagcccggccgcgtggtgctggaattcgtgctgcatgagggccgcaaccgccagatccgcaacatgtgtgaagcagtgggccttgaagtggccagactgaagcgcacggccatcggcgcggtgaagctcggcatgctgccgcaggggcgcttccgtgacctgaccccggacgaagtgcgcagattatgcgccgccgcacagaaaaaaggaaacgcgcagaacacacagcgcgaggaggaaaaacaaaatgctgcaaatcgtaccaatggcggaaaaaacagaagaagccgccctgctggcaaaaacagagggcgcacccgataacggccgtgtgcttgtgatgacggatggcgaagaaacgctcggctatgtcgtcgtcgcgcttgaagacgacacgcttgtgttctacggcttttccgtctccgggcagaccgatttcacaaaagcaaagcccgaccccatgacggcttttgtgctcgatacacttatgcgctccgccgcgtcgttcggcgagacgaacggcatgaatcacatccgcaccgcgttcccggatttttttgatttcttcaagcagcgcgggtttacggttgcggaagatcacgccgaagcgccgatgagcctcatcgtgcattacgaataaaccccaaaatgccgcaaagcgaaacctctttatgcggtattgcctcaaaattgccgcgggctgctgcctgcggtgttttgtttttttcgaaaattccgattttcgcccgcgataggttgcattttccggcttaaaatggtaaaatatcttgatagaattaaagtcgggtactatgtcctctgtgaggaacacaaaatatcccgaaaaacatagacagaattttagaaaagagatgatcctatgctgaaaagcatgaccgggtacggccgctgcgaagaaaccgtcaacggcagacacattacggcggagctgaaatcggtcaaccacaagtattttgaattttctccccgtgtgacgcgcggctacggattccttgaggataagctgaaaacctacgtgcagagccgtgtggcacgcggcaagattgatttttatttgagcattgagacactggaggacacggatgtcgtcgtcagtgtgaaccactcgcttgccgcgggttatattgcggcgttccgcgagctttccgagcgctaccatctgccggataccgttaccgtcaattctctttcgcgctaccccgatattttttccgtgcacaaggcgccggaggatgaggaagccatttgggcagacgtgaagcaggttgctgaaaaagcggtggacgcgtttattcaaatgcgcgagacggagggacagcgcctttatgaggacgtcatgtcgcgtgcagaaacgattttaaacatcgtcgggcagattgaagagcgctccccggagaccgtcacggaataccgcgagcgtctggaagcaaagctgcgcgaggtactgaatgacaccacaatcgacgagcagcgcattttgaccgaagccgccatttttgcggataaggtcgccgtggcggaagaaaccgtgcgtctgcgcagccatttcgaccagcttaaggcgttcttgagcgccgaagagccctccggtcgaaaaatggattttcttgtacaggaaatgaaccgcgaagcgaatacgatcggctcgaaggccagcgattccaagatcgcctacatggtggtggatatcaaggccgagattgaaaagatccgcgagcagatccagaacatcgagtaaggagcgtttattatgcagcttgtgaacatcggctttggcaacatgatttccgcagagcgcatgatcgccattgtcagcccggaatccgcgccgattaagcgcatcgtgcaggattcaagggaacgcggcgccttgatcgatgccacgtgcggcagaaaaacgcgcaccgtcatcatcatggacagtgaccatgtggtgctttccgctttgcagctggagaccgttgcaaaccgctttaacaccggcgaaaaagcagaagaccccgttgaagcggaagccccgaatgtataaataacggaaaagaaaggaatgtttccgatgaaaaaaagaggactgcttgttgtcgtttcatcgccctccggcggcggcaaggggaccattttaaaagaattgttccgccgcaatgagaatcttaaaatgtccgtttccgccaccacgcgcgccccgcgcccgggggaggaacacggcgtgcactattacttcatcacaaaagacgagttcaaaacgaacatcgaaaaccatgcgatgcttgaatatgcagaatactgcgataacttctacggcacgccgaaagcgccggttgaaaagtggcttgaggaagggcgcgatgtcgtgcttgagattgaggtgcagggcggcagacagattaaaaaagtcgcgccggactgcgtgagccttttcatcctgccgccgtccttaaaggtgcttgaaaagcgtctgcgcggcagaggcaccgaaacagaagaagttatagagaagcgcctcgctgccgcggcagacgagatccgctgcgtaaaagattacgattatgccgtcatcaacgacacggtcgaacaggccgtgcttgatatagaagccattttagccgcggagaagctgcgtgtttcccgcgaaaaagatatagcagaaaggatcctgaaccatgcttaaaccgtcctgtaacatcattaaaaccccgcacaagagctattattccgttgttatcgccgttgcaaagcgcgcaagagaaattacacaggaagcggaagacaacaatgaaatcatcgttgaaaagccggttgatctggccgtgcaggacttcgtcgatgagaagtataagatcatcgagccggacgagattgacggctaatttaccgtaaagggagtttttgctttgctggcgcagttggccttggagaataccacatatcggtttgataaaccgtttacgtatagtgtgccgcaggcattggaaacggcggtacgtccgggcgtacgcgttactgtgccgtttggcgcaggcaaccgcacgcgcgttgccatggtgctctctacgtcgtatgaaagcggcgcagggcaaaagctgaaagccatcgcgtctgttttggacaaagagccgcttttggatgacgaaatgctggcgctcatcccatggatgaaaagccgctgcttctgcacactgtacgatgccgtaaaggtcatgattcccgccggcatcggctataagctcgtaaaccgctatcgcatgaatgccgcgttcaaaaactatgaccgcgaagcgttcacggataccgcgtggcagattatcacagcgctgacggcggcaaaaaacggacttaccggcgcagaactcaccgaaaggctcggcatagaagaaaaaagcagcgatctgctttcgctgctcgaaaacggcacggtcatacgcgaaaacgcggcgtcccgcaatgcggcggatgccactacgcgcatggtctgtgccgtgccggatttttccggcaagctgactccgaagcagcaaagcgcgttcgatacgctgtgcgccatcggcaccgtaaccgtgcgcgagctgagctactataccggcgtgagtgcgggtatcatccgcacgcttgccgataagggcgcagcggagatttttgaagtcgagcgcttccgacgcccaaagcaggaaatggcagacatcaagctgccgcagacgctttcggcagagcagatgaatgtggcaaatgacattctgcgcgaatgcgatgtggcagaaccgatggtcggtctgctctacggtgtgacgggctccggtaaaactgccgtgttcctgcatgtcattcgccatgtgcttactgttggcaagggtgtcatcgtcacggtgccggagatttctcttaccccgcagacgcttgccgtgtttacggcggcgttcggcgataccgttgcggttttccacagcgggctttccgttggcgagcgcatggatgagtggaagcgcgtgcgcaccggcagggcgaaaattgtcgtcggcacgcgttctgccgtgttcgcgcccgtgcagaatctcgggctcatcgtcatggacgaggagcaggagagtacgtataaatcggagagcacgccgcgctaccacgcacgggacatcgcgaagtttcgcgtgaattataaccgcgcttactgccttttatgctccgctacgccgtccgttgagtcctactacatggcgcaaagcggcaagtaccgctaccacgtgctgcaccaccgctacggcgatgccgttgtgcctacggtgcagcttgtcgatatgaacaacgaagatctctaccgcggcaagccgatgatcagtatggcgctggcgcgtgcggtctccgaaaatatccgcgcgggcagacagtccattttgctgctcaaccgccgcggctaccacacgtatgccgtgtgcaaggactgcaaaacggtcgccgcgtgcccgaactgctccatttccatgacataccacgcggcgaataaccgcctgatgtgccactactgcggccattccgaaccggcttacgtgcgctgtaagacgtgcggcggtgagctgaccttttccggcggcggcacgcagaaggcggaggatcagctgcgggaggcgttcccggaggcgcgcatcctgcgcgtggataccgataccaccgcgaacaaatacgcacttgaaaagaagctcaacgcatttgcaaacggcgagtatgacatcatgatcggcacgcagatggttgcaaaggggcttgatttcgagaacgtcacgcttgtcggcgtgctttcggcagatcagtccttatacagcgatgattaccgcagcaacgagcgcacattcgacttgcttacacaggtcgtggggcgtgcggggcgcggacgctaccgcggcatggcgctcattcaaacgcatgtgccggaaaacccgtacctgcaccttgccgccgcgcaggattacgaaagcttttttgaaacggaaattcggttcagaagggccatgctgtatccgccgtttgcggatcttttgcaaatcggctttgtgggcgaaaaggaagacaccgtgcgtgcggcagcggagcatttctccgcgctgcttgcagagatgttccgccgggactatcccaacttgccgctgcgtttattgcgcgcctctgcggcatccgtgtcacgtatgggcggcaaataccgatataagattatcatgaaatacaagaattccaaggcgtttcgggatgccattgcgatgcttttgagcgcgttttcaagcgataagcgctttttgagcgtcaccgcgtatgcagacccgaaccccgatgcgattttgtaacagaaatttgaattcacaggaaaggagtgccgcaaatggcgcttagaaatattgtgaaaaagggcgacgacgtgctgaccaaaatgtgccgcccggtcgaaaaattcgatgagaagctttgtacgctgcttgacgatatgtacgagacgatggaggacgcaaacggcgtcggccttgctgcaccgcaggtcggtttgctgcgccgcatcgttgttatcgatgtcggcgagggccgcattgagcttatcaacccggaaatcatcaaaacctccggcgagcaggacggcgcagagggctgcctctcgttcccgggtgagtttggcatggtcaagcgcccgatgaacgtcaccgtccgcgcacaggacagaaacggcaaaacgtttgaaatcagcggcacagagctgctggcccgcgcgttctgccatgaaattgaccacctgaacggcgtatgctttgtcacgcgcgccagccgcatgctggagccggacgagttggaaagctaagacagaatttagagaaaaaggaggaatttccatgcgcatcgtattcatgggcacaccggattttgccgtaccgagcctcaacgcgcttctggagcgcggccatgagattttggcggtctatacccagccggataagccgaagggcagggggcacaagctgctgccgccgcccgtaaaagaaacggcaatggcacacaacattgaagtgcgtcagccgacgacatttaaaaataatgaagacgaaatagcgtatttgaaggcgcttgcgccggagctcatcgttgttgcggcgtatggaaagattctgccgccgcgtgtgctgaacatcccgccgcgcgggtgcatcaacgtgcacggctctttgctgccgaagtaccgcggcgccgcgccgatccagtgggcggtgctgaacggcgataaaatcaccggcgtgaccatcatgcagatggcagatggcatagacaccggcgacatgctggcgaaagcggaaacgcctattggtgaagacgagactgcaggcgagcttttcgaccgcctgatggtgctcggggctgagctgctcgtcgataccattgataagctcgacaccatcaccccgcagccgcagaacgatgcggaagcaatccacgcgccgatgatccgtaaggagatgggcgcaatcgactggacacagcccgccgagcgcgtgcacgaccttgtgcgcggtttgaacccgtggccgtctgcgtttttcacgttagagggcaagcgcatgaagctgcacaggacgaaagtcgttgtcggcaaaggcgaaccgggcgaaattgcggtgatcggcggcgaaatggccgtttgctgcggcgaaaatgccgtgcagctcatggaaattcagccggaaaacggcaagcgtatgcgcggcagcgattatctgcgcggtcacgcgatagaagcaaaggcgaaggttcagtaatatggcgacttcttcccgaaaaacggcgcttacggcgctttccgaggtgacggaaaacgagggttactcgaacatcgtcatcgataaagccattcgcgcggcggagctttctccgcgcgacgcggcgctggcctccaccattttctatggcgttttggaaaagcgtctgacgctcgatttttatattcgcaagttcctcgcaaaaccgaagcagaagctggacggcacggtgctcaacatcttgcgtatcgccgtgtatcaaatgatgtaccttgaccgtgtgccggattccgccgccgtgaacgaagccgttttgtgcgcggcagaatatcggcgcgggcagtataaaaacttcgtgaacggtgtgctgcgcagctttgcgcgcggttggcatgaggtaatcattcccgaagatgacctcagcgttcgctataacattccgcagccgatcatcgagagctttaaaaaggattacggcgagaccgtttgcatagatttgttaaaggctatgtccgagcgggcggaaacgtatatccgcataaatccgctaaagaccacggtggacgatttgatacaatcgctgccggaaaacaccgcggagaaaacggtgctccaaaacgccctttgcgtgcacggcacgggcgatgttaccggtttgccgggctttgcggaaggcaaattccatgtgcaagatctttcttcgcagcttttgtgtgcgtttgtttcaccgcaacccggagagcggcttgcggatgtctgtgcagcgccgggcggcaagagcttcacgcttgcggaatacatggaaaacacaggcgtgctcgatgcgttcgatttatacaaaggccgcgtgaacctcatcaaaaaaggcgcggagagattaggcttgagcatcattcacgccgccgtgcgcgatgccgcgaccggtgtgtgtgaaaagcagtacaaccgcgtgctgtgcgatgtgccatgctccggactcggggttattcgacgcaagccggaaatccgctataaaaagcaggagagctttaaagagttgcctgcgttgcagctcaaaattttggagcattccgcgcagcttgtgcgcccgggcggcatactgttttattccacgtgcacgttgcgcaatgcggaaaacggcgcggtggtgaccgaatttttaaagtgccatccggagtttgaaccgtatgatctgcccgaaacggagggcatatcccacacggtgaacgaaccgacattcatgcgcaccatgatgcccatggaccacggcggagacggctttttcgccgccgccatgcgcagaaaaacagaaacagggaaggagacgaagcgttgaccgatataaaatccatgctgctttcggagctgcaggaggactttgccttgcgcggcttgcaaaaattccgcgcagcgcaggtataccgctggctgcatcagcgcggcgcgacctcgtttgacgagatgacggacctttccaaagacctgcgcgttgctttaaaagaaagctttgaaatacgaaatacggagatcgccattcggcgcgtttccaaaatagacggcaccaaaaagtatcttttccgcttgaacgacggtgagatgattgaatccgtcctcatgaaatataaacacggctactccatttgcatttccacacaggtgggctgcaaaatgggctgcacgttctgtgccacgggcaaaagcggcttttcgcgcgatcttttgccgagtgagatgatttcggaaatccagacggcgcagaaagacatcggcgagcgcatctcgaatgtcgttttgatgggcatgggcgagccgctcgacaattataagaatgttttaagatttttggagcttgtttcgtcagaaaacgggcttaatataggtatgcggcatatttcgctttcaacttgcgggcttgtcgaaaaaatttacgatcttgccgaccgcaagttgcagctgacgctttccgtttcgttgcatgcgccgaacgacgagatcagaagccgcaccatgccggtcaaccgcaagtggaacgtggagcagctcttaaaagcctgccgctattattccgacgtaacgggccgtcgcatctcctttgaatacgccatgatcagcggtgtgaacgacagcgatgcctgcgcaaacgagcttgcatcccgcctgcgtggcatcatcgcccacgtgaacctcattccggtaaatgacgtcaccggcacgggctaccgcaaaagcggggaggagagactcagaaaattcacggcgatcctcgaaaaacggggtatcaccgctaccgtccggcgcacgctcggatcggatatagaagcgtcctgcggacagctccgtcgacgcaatgaacagggaggtacagtctaatgtacgcggtatgcaaaacggatatcggacaggtgcgcagctctaaccaggacatctgccgctgtggcactttttcggacggcagcgcgtggaccgtggtttgcgacggcatgggcggcgtaaacggcggcaacattgcaagcagtgttgcctgcgacgccatctgcaaagcgatcacggaaaactacacgccggatatggaagaagacgcagtgcgcgacataatgctgcatgcaatcaatgacgcgaacgcggcggtgctgcaccgcgcgcaggaagacccggccttaaacggtatgggcaccacggttgtcgtcagcattgcggcgggcggcgtgctgcacattgcccacgcaggcgacagccgctgctacttaaagacggcgcttggcgtaaaacaggttacgaccgaccattcctttgtgcagcagcttgtggaaagcggcgccatcacggaggacgaggcgcgcgtgcacccgcagcgcaacctcatcacgcgcgttgtgggcgtgcaccccgaggtggagtgcgattacggctgctataaattcgagcccggcgatctggcgctttcctgcacagacggcctgagcaattacttagagcgcgacacgctgctgcttttcatcagcaactatcggggagaagagcttgccgatgaactgatccgctatgcaaacagcaagggcggcagcgataatgtgaccgtcgcggtgattgagaaccgctgagaaaggatgaaaaagaatggataaatatattggtaaacgtttagacggccgctatgagatccacgagcttctcggcgtaggcggtatggcgtatgtgtacaaggcgtatgacaatattgaaaaacgttgggttgccattaaaattttaaaggaagagcttgcgggcaacagcgattttctgcgccgtttccgcaatgaatcgaaagccattgcggtgctttcgcacccgaatattgtcaaggtctatgatgtcagctttggtgaccgcattcagtacatcgtcatggagtatatcgatggcatcaccttgaagcagtatattgagcagcagggcgagatcaaatggagagaggcgctgtactttacggtgcagatcctccgcgctttgcagcacgcccacgaaaaaggcatcattcacagagacatcaagccgcagaacatcatgctgctcgaggacggcaccattaaggtgacggatttcggcatcgcacgcttctcacaggcagaaacgcagaccatgaccgacaaggccatcggctctgtgcactatatcgcgccggagcaggcgcgcggcggttatatcaacgataaggccgatatttattctgtaggcgtcatgctgtatgaaatgctcacgggtcagctgccgttcgttgcggataacgcggtctccgtcgccatcatgcagatgcaggcagagcccacaccgccctcgcgcatcaacccgtccattccgaagggcctcgaagagattacgatgcacgccatggagaaaaacccggcgcagcgcttcccctcggcagcggatatgctggaggacgtggagcgcttccgccgcaacccggaaattgtgttccactacggcgagcaagtagaccgcgcgtatgcgggcacctctgcggatatttacggcaacgtgcagcagaacgcagcgccgcagaagtataatgacaactacgagtacgaagaagaatatgtgcgctccaaaaacggtgcgcgcgcttccaatatcatcaagggcatcgtggcagctgtcatcgttgtggcccttgtggtaggaggcattttcggttggcggtatcttcagaatctgacgacctccacaaacaagacctctgatgagatcgtcctgccaaaatttgtcgggatgatttatgcgtccgacatagagggaaacagtgaatatgcggacctcacgtttgagatcacctacggcaacgtgcccagcaagcagccgggcgaggtgctgcgccagaccccggcggccggcatgaccgtaaaaaagggcaagaccgtttcgctcaccgtcaacggcgaggccgagcaggtcgttgtggaagacgtgaagggatataagcagcaggatgcgtatgacgcactgaaggcactgaatctttcaccgaagattcaggcagtcgccgatgacgacaccgcagtcggttacgtcgtcaagaccgacccggcggcaggctctaccgtttctaccggcactacggtcacaatctacgtcagctccggcccgtctacggaaagcgccgtgattccgaacatcgtcggctaccagtacagcgccgcgaaagaggagctggaagccgcgggctttgtggtcacagcggaatacgacgacgagagcgacaaggacgaaaacaccgtgctttccgtttccccgaaagagggcgaaaaggcgaagaagggctcggtcgtcaccgtaacggtcagctccggtaagggcgcgcagaaagatgtctattacgacattccgctgcccggcggcgtatcggatgatcttacgatgaagatctacgtggacggtacactcattgagacgcgcacggtgaacccctcgacttctccgtactccaacatgacgttcacgggcaaaggccgcgcgaacctcgtcatcacgctgaacgaccagcagtatatcacggcggagattgattacaccacgcagagcatcaacgtgacctcgcagcagtcgtatgcaacgccggagccggaaccgaccccaacgccggacaacggcggcgacatgagcgggtctgacggctcggtcacggcgcacgaagattaatatgggcgaaatgaaagaagggctggtcatcaagggcatcggcgggttctactacgtgcagtgcggcgatgtgctgcacgcctgccgcgcaagaggcaagttccgtaaagataaaatttcgccgtatgccggcgaccgcgtccgcattgaagtggacgcgaacgatgagggctacgtgcaggagattttgccgcgcaaaaactttcttgtgcgcccgccgcttgcaaacctcgataagctgtttgtcgtgtcttccgtctgcgacccacagcccagcaccctcatcatcgataaaaccatcgccgcggcggagctaaagggcatcgagcctgtgctcgtgttcacaaagaccgacctaagcgatacgacggagctgaaagacatttacggcagcatcggcattcggtgctacttcgtctcggcggcggacggcgtgggcgtggacgacctgcgcccggagcttacgggctgcatctccgcatttacgggtaactccggcgtgggcaaatccacgcttttgaacctgcttgtgccggagctggagcttgcaacgggtgagaccagcaaaaagctcggccgcggccgccacaccacgcgtcacgtggagctgtaccccgtggagggcggctatgtggccgatacgcccggcttttccaccatggatatcgagcgttacgagctgttccgcaaggaagagctgccggagggattcagggagtttgcgccgtacctcggcgaatgcagatttacctcctgctcgcatacctgcgaaaaaggctgcgcggtattgaaggctgtggaagaggggaaaatttcccgctcccgcatagacagttacattgcaatgtataacgaagtgaaggacataaaggaatggcagttatcaaagacaaaaaatgtatgatcatcggcgcggctccgctggcgtccggcgccgtttttgaagaattcgatccgaaagagcactacgtcatctgtgcggatgcgggctacgacaccgctgtgcagtacggcgttcgccccgaccttgtcatcggcgattttgactccaccgcaaagcgcccgccggagacgatccgcaccattaagctccccgttgaaaaggacgttaccgatatgatgggcgccgtcatggtggggcagaagctcggctataagacattcgtgcttatcggcggcctcggcggcgatcgcttcgatcactccatggcgaacctcgatgtgcttttgtatatctccaagcacggcggcagcgcggtgctgtgtacggaagacaccaaggtgttcgttgtgcgctgcgggcgtattgtgctgacggagctgaaaggcgccacggtctccgtgttcccgtttgacggctcttcctgcaacctgacgtatgagggccttcagtatccgctggagaaaaaagacctctccgcgggttcgtctttaatgggcgtgagcaactgcatcatctccgaccgtgcggaaattcgcgtgaacatcggctgcgcgctcgtcattgtctacacgccgaaggatatgccggcagaaccgccgcaaagcgagattcaaagccgcctgcccgaaacggaagacaaaaaagataccgaaaaataatccgtaaccaaatgatgcacctccgtatatactggaatgaccccgtaagggagcttcggtaaacggaggtgcttttctatgcgaatgccgaaatgctgcaataacccatgctttcgggaccgaaaactgcgcgcactgtgcgccgtttcattcggactcggcatggtacttgcacagatctccccggaggggctcgtgctgttcatcgccgccgtgattcttgtcgcactcggcgtagcggtgctgcgcacattatgatctcggaaaggaacggtattttatgaaggtcgtcatcgtcaacggcaaagggttcatcggcttcatgctgcggcatatgttcggcatcagaaagctgccgcaagagacataacacaaaactgcacataacaaaaaggctcactgcgggggaacagtgagccttttgcgtattacgttatgattgaatttaggaaagcttagatcacgttatattccttgagcagcttttcaatgtccgtatgctcaattttcttcagcgcttctttcagaacaaggcgctcgatgaggccgaggtccatatcggtcactttcttgccgtcgcggagtttaacggtggcatcaagtagtgcgcgtaaatcgtatacgctgccccagacctccggcacgccacggtctacgttcagcagcgtgtatacggcctccatgccggtacgcatggagtattccgtcgtgaaaatggtgtcgcgcttcgtttcggcgaattgaccgaggaacgcgaagttcacagcgcctgcaggcacaacgtccgggcggtcgccgtatgcgcgaggcatgaagaatgcggtgatatacggcatcatgcacggcacggtgttggcgctcgtctccgcaagctcttcaatctgatcctccggtacaccgatgtgatacagccattccatacagatctccttgccggtgcactcacgcatcggctttttgacgtaatcgccgggcttgtcggagaacaggccataaacccacacaaggcagtgacccttcggctgtgctttgaactgcggctggcggttgatggtccagcttaaaagccaggaggagtcctttacggaaacaatgccgccggtgacgaccttgccggtgaacgggtcgcgcttgcagatgttcttgatatacggaatgatgcggtcgtcaagcgtctcaacggtggcgctcatccagttcgtctgctcaggatcgctgcagaacttatccgggtgaccgaaagaggagtcttgcgcggcaattttgcgccacatatcccagccgccgctctcgcggatttcggtattgaacttagccggcgtgttctggtcaccgatagaggaattctccacgcagccgccgtttgtaatgaacacaaggtcgttttcggtgaggtcgatgtgctcttccttgccgtcgcgcagcgtgtcgatgcgcgttgcaagcttgcgctgttcgttacagtcaaactcgacgtttgtgaccttcacgccgaagtgaaactgcacgccgtagctttcaaggtacttcaccatcggcagaatcatggactcatactggttgtactttgtaaagcgcagtgccttgaaatccggcagaccgccgatgtggtggataaagcgctgaatgtacagcttcatctcgagtgcggagtgccagttttcaaaggcgaacatcgtgcgccagtagagccagaagttggagttcagcacctcgtcgtcgaatacgtccgtgatgcgcttgtcctgcaaatcttcgttcggcgtgaagaacagcttcatgatctccatagcgcctttatcggaaatatcaaacttgccgtccgtgtgggcgtcctcgccgcggttcacggtcgcgcggcacagggagtagttcgggtcttctttgttaagccagtaatattcgtccaaaacggaaacaccctcggtctccatggacggaatggaacggaacaggtcccacatgacttcaaagtggttgtccatttcacggccgccgcgcatcacgtagccgacgttttcaaacttccagccgtcgcatgcgccgcccgcgagctgctctttttcgaggatgtgcacatgctcgcctttcatctggccgtcgcgcaccaggtagcacgctgctgtaagggctgccagaccgctgccgacgatatacgccgatttttggtctacgccctccggcttcttcggtcttgcaaatgcttcatagttgccgcttgcataatacatataaaaaacctcctaaagtgtttcttttgtttttgtgtctacatcttagcatgtctttttgtgcgaaacaatatacagaaaagccgccgtgttcagtttttaaacacggcggcaaatgcgtataaatttttatcacgaacggcgttttgataaaaaagggcagcgccatactctcaaacagcgctgcccgtatgatttcaaatttaagcgtttctgtaccgttccagcgcggcagagacactgccgtgtattgcaacggaaagatcggcgacgattgtatttgggtcatccttcatgtcgtgcttgatccagtccaacacaagccccacaaaggcatatttatagaaatttgcaaggaatttcttgtcttcgtcgcgcacgttcatgcctttggctttttcgtttatcacgtgtataagaagatcataggtgatgcggtacaggtagttttccaccttttcacggctgatggaacggtaaacattcatgataaacggcttgtttgcgttcaaatcttcaaaaatgcgcaggtagccttgctgccaagtatcgtagccctttttgccctccaaaatgcgactggcttcttcctcaaatgcccattcaatgaggtcgtaaatatccttaaagtgatagtaaaacgtcatgcggctgatgccgcagtcatctgtaatatcgctgatggtgactttatcgagcggctttttaagcaactgatttttaagcgaagcgacaagcgcacgctttgtgacctgagacatagtaaacctccggcagttttttctttcttcttcacgatatctgaatagcgtttttctatatatttcct

SEQ ID NO: 1690 - DNA, 48716 bp, Unknown
  gut microbiota DNA sequence
atgaagtgcgtgccgcagcaggtgcacatttcggtgtgatcaccgtcttccacctccacgatgcgtacctcgccgtgcaacttctcatttttcttgcgcagcggcagattcggaagctcggaagcgtccacactaaaaatacgcacgggcgcgtttttccaaacgagttcatttgcgtatttttcgccggcctcgatctcctcatccgataaatcgtggtcaaggtcgatggtcacgacgtctcccgccatgtgaaagccgacgttttccgcgccgaacagcacgtcataggcatgcgaaagcaggtgttcgcccgtgtgctgctgggtgtatttcaaacgctttgcggcatccactttgagcgtgacgatttcgcccaccgcaaacggctttcctgtgcggtgcagcaccgtgccgttcgcttcaaagcagtgtgtgaccggcacaaagccctgcatagggtcgtaaaccgtaccgatgtcgctcagctgcccgccgccttccggaaaaaacggtgtgcggtcagtctcaaggtcatagccgtcgtttttgttcggcgtacagctcacaacacgcgcggtgcattcgagcatctccggcgcggtgagatacaatttttcgcagctcatttatgtactccttttgtaaaacgaggtgccgccgcagccgcaccccgcctattctatgtttaattcagtttaattcaaaatgttccgcaagcttttgaagcacttcttcgcgcgtatcgcgctctgtgttttcccgtatcagcgtgaaaaatccgctgtgcagataagcttcatacacctccgggctgttcaccgacgcaatacacgctttgaaattttcaaacgccgcttccgggttcgagcacttttcgatctctttcagcaaaaactgcttttccggatcgccgcggttgaaaaacgatgcaacagatatactttgcggtgagagcatcaccgccacgtggttcggctctgcgattttatacaaggtatcaagtgggatattggtatcgactatgacttttctgtcgcccgaaagtcgaatcagctcggcgacttcaaattccgctacttcttccgagacgccgttataccaatcataaaattccttcggcgtgcgggaaacgtagtgctgccaactcggcatcgtgttgaaataattcaagtttggctgattctgctcgtcaacggcggacaagatcgtgtccatgttgtaattttcttcgcagtgcagcatgttgtacttttttgataacatgctgcacatggtcgattttccggcatatgccgtgccggtgataaaatagcagtttttaagatagaattttaaaatattatcttgaattttcatgtatatagctcctttttgacataacaaacttagggtctcttgacccaatttcaaacgactgatttctcagcggatgcggttgttgttatacaaaaagctgcaatacataaagtgttctcctttgctaaagctaaatttcgcttcggtattttcagtatagcatagaaaactctaaaaggctaccgaaaaatgaaaaaatgcgccggacgcccgacgcatcttgaattttcagcttatctgccgcagcacttcttgtactttttgccgctgccgcaggggcacggatcgttacggccgaccttcggaccctttacgattgtggtggaagccttctgtgccttgtagagctccttgcgcttctcttcggtgagaatggaatcccactgcgggagcttatacagccactcggcctttgcgccgaccatgttgtaatagagcttctccggctcgtaatcaagggaaacctccgtctcggcggtcatgttctccaggtcgttttccgccttgagactctcgttgatgccgtcaaggtagccggtcatttcgatgatatccacgccgaagtggtcagcgagtgcctgtacggtgccgctcttcggagcttcgcccttgaggagcttctcgtaaaaatccttttctctaaggaaatattgtgtccagtactgttctgcgccgggctctgcggacttcttgtctgcaaaatcctgccaatccttaaaaagtgccatgatgcttcatccttttcgtatcttttaagcggctttcggttatcccctgaaagtctatttttgattataaccgaatccgctgcttttttcaagcagaaactaccctaatatattgaaaaatagtgccaaacgtgctattcttataaagaaatcccgattatatttcgattttttagttgaatttctattttttgagcacaaggagacaaaaatggaaccgaacaacgagcgcaaaacgcccgcgggcgagcaaaatgaactctttaaaaagcaggtcttcagcgataagacgctgcgcaccgcagatcccgatgaagaagaaaccggtgagcagcattttgaaacgctcactttcgataaacccgccgtgctcgacgaacgctttgccgcgcgcaaagcagaacgcgaaaccgcacagccgccgcaggcaaaaccggcggctcctcgtcctgccgcaaagccggtaaagcgccaagtgcccgccgcacagaaaaacaaatccgtttctcatgagcgcagattgtacagcggcgaaacaccgtccgacgcagcattgcgcatcacgcggcagattgcggcgcttatgctgtgcctgctgcttgtgtgcggcggcttctgggcaaagggcaccgtgtgggacatttggaccgaccgcgatattgaagacgtgcagaaaagcacgtattacagtgctgccgcaaacagtgcacaacttcgcttagatcagaatctccccatcggttacgacgccgcgcaggctgtatgtatttctttgggacagcccatttcgtcttccgctattcccgcaaaagcagatgacaaagacacgctcatcttccccgcagaccttacgggcagcatggaaacggcgctcggcagccaaaagctgcagcttgaaaccggccttacgaacaccgatcttttcaaagaaatctacaaaagcctcaagaaaaagaaacccgtcatcgcgctgatgctcgttgctgacgcagaatcggccaagctgcaatacggtgttgtgaccggccttgatgtccgcaacaaccgcgtgaccgtggcgctcagcgaaggcgtggacacgtacacgctggcggagttcgtcgctgccacacgctttgaaaacacgaagaacatcccgcttcgcttgcggttttcgctgcttttcggtacactttcccgcaatacggcgatctttttaaaatgagcgggctgaagattactctccccgcgccgtgcgcgttcatcctctcccgcctacacgaaaacggttttgaggcctacgccgtcggcgggtgcgtgcgcgacagcttactgcacaaaacgccgcacgattgggacatcacgaccgcggcaaagccgaaaaaaatcatcgagcttttttccgacattcccgttttagagaccggccttaagcacggcacggtgacactgctcatcgaccacgaaccgtacgaggtaacaacgtttcgcgtagacggcgattacacagacggccgtcacccggacagcgttgcattcacgaccgatattcgggatgaccttgcgcggcgcgacctgacaatcaacgccatggcctacagccccgcaaccggaatcattgacccgttcggcgggcaggaagacctgaaaaataaaatcattcgttgcgtgggcgacccgcacaagcgattttcggaagatgcgctgcgcctgatgcgcacgattcgtttcgcggctgtactcggatttacggtcgaacccgaaacgctgcgcgccgtgcacgacctgcatgaaacgatcgggcgcgtcgcaaaagagcgcatttttacggagcttttaaagaccgtctgcgcaccgcatgccgccgaagcgctgcgtgccgcgccggagttgtttttttgcgccgtgccgcagctcgaaaatctcaagggtgtgccgcaaaacagcaaatatcacatttacgacgtatgggagcacacgctgcacgcgctcgaaagtatcggcacggatgaccccatcgcctgccttgcgattttatttcacgatgtcggcaaaaaagccgtccgcacgacgggtgaagacggttatgaccactttttcgggcacgcggagaaaagcgccgcgttcaccgatgaagctctgcgcgcgctgcactgcgacaacaaaacgcgcgaaaacgtcgcggagcttgttttgctgcacgataccgcttttccgaagcgcacggcaaaattccgccgcctgctcgcaaagctcggctatgagcagttctaccgcttgctcgccgtaagccgtgcagacagcttagcgcacgcgccgtggtgcatcgaagaccgctgcaaagcgcttgcggatgccaaaagcgaagccgaagcgctgcaaaaagcggatttctgcttatctctgcgccaactcaaaatcaccggcaaagacctgcaagcgtttggctttcagggcaaagcaatcggcgaaaccctaaacaaactcttagacgctgtgctgtgcggccagcttccgaatgaccgcgaagtcttgcttttgcaccttgaacggtacacacaaaaacacaaataaagtgcaaaccgcgccgctcggagcttttccgaaacggcgcggttttttcggcctttacttatatgtatcgtaaaggccgaagctgataccgatggcttcgttgacgcgctgcatggcgtcgtcatcgagcttgcccattttttcttttaaacggtgcttatcaatggtgcggacctgctccaaaagcacaatggaatccttttgcaggccggtgcgctcagcatggagcgcaatgtgcgtgggcaggtttgttttgtcgcgctggctcgtgatggccgccgcgatcaccgtgggactgaaccggttgcccacatcgttctgcacaataagcacggggcgcacgccgccctgctcgctgcccaccacggggcttaaatctgcgtagtaaatatcgcctctgtgtacattcacggttttcacactccgaacagaatttgcatcaacgcccgcggcgctacttatattcttgcccgttttttcggcgcttaaacacgcctgttccattctattacaaagttgtgtgttccgtgcaaaatgtgcaggatttatttgccctcgatctgcaaaaagacctgcggcaatttttcgatgaggtctgtcggcaacataccgtgctgcgaaagcgcttcggcgcaaaggtcacccgccgcaccgtgaatgcacacggcggaatatgccgcttcaaacggctgcatattctgcgcgcacagcgcacctgtgatgccggccaaaacatcgccgctgccgccctttgccatgccggggttgcccgttgtgttcacacgtgtttcaccgctcggcgctgcgataattgtgcccgcaccctttagcacggtgataacgcggtacgtctgcgcaaaggcacgcgcggtctgcaaacggtcggcacgcagctccgccatggtgcggccgttcaagcggcacatctcgcccgggtgcggcgtgatgatgaccggggcctgcggcacgagtagtttttccggcgttttggcaaggatattcagcgcatccgcatccagaacgaccgccccgtgcgcattttcgagtacggcatccacgagctttaccgcatacggcgccgtgccgagcccgcagcccacaaggcacgcactcgccttgtcgatagcgtcaagcaccgcttcacccggcgcttccgtggggtcatacagcgtgaagattgcctccggcacggcgggagccaagattggatacagcgcatgcggaatggcgatgttcaaaagtcccacaccgctgcgcagcgccgcacgcgcagccatgatgcacgcacctgccatgcccacgctgccgcagatcattaaaagccgcccgtatgtgcccttgtgtccctccgggtcacgcttcgggaacagcgggcaaatgttgccgagcaaaacggattccgtgtcgcacggcagcatctcaaggtgctcctccttgatgcccacctgacgcacaacggtcatgccgccaaagcccgctgccgggtacacaacgcccgccggcttcatcgccgtaaacgtcaccgtaaggtctgccttaaagcacgcgccctccaccgcgccagtatcacacaccgcaccgcttggaatatccacggaaatgtgaaacgcttttttattttccgctgcacgcgcaaacaaaggctccatcacgctcggcagacggccgtgaaagctgaagccgaacaccgcatcgatgatgacgtccgccgcgtctaccgcgctgcctgccgtgcggtacatgatgatctcaatgccgcggcccattttgtcatacgcctgctttgcaaggtcggaggccggtgcgccctgcatcaaaacgaccgtcacctttgcgccctcggccgccaataagcgcgccgccacaaagccgtcgccgccgttgttgcctttgccgcacaaaatgaccgttttcttgcctgtgacgtccattttctctgtcactgctgccgccaccgcggcgcccgcgttctccataagcgtttccatggaaacgccggattccaccgcgcacgattccagccctctgacctctgccgctgtcaatacccgcatatacctgcctcttttccgtagcattctatgctttaatggtatcattttcccgcgcggttttcaactatggaagcggtgaaaattgaaatcattttcgcgccgcacggaaaagcgccccgtcaccggaaaatctccgataacggggcgcttcacattttgaatttagtttctgccgaagatttcaaactttaatcttctgtccataaacggcttgatggcatcgatgcagcgctcgtccggcgagaacacaagaagcgtcaagccggtcttgcggctctttgcaatgatgtaccacgcgtccttgccgtcgtccgtctccgccgcgaagatggtcttgtccacacgcttaccttttaacttctgcgcattctccgtgtacttacccatctcttcaatcgccttggcatcgaaagacgtgagacgtttacgatttctgcggttgatgatcttatctaccgcaatgtcgccgttcgtgatgctgtactcaaactccaggctgcgcgaggagatgacgtagtacacgccataaatcacgccgcagatcacgaggaacgggatcatcggcgaaaccggcgtcaggaaaatgctgacaaaaatcaagatcgcgccgaggatcgacacgccgagcgacatcaaaacatccttgctgccggtcttctttttcaccatgtattccacaaacacatctgtcatcatactgtaaattaccttccgtttccataattcaatattgtcattgtaccataacccacacggaagttcaactgcgtaatttgtgaatttttatcgaatattacgaatactgtgcgataaccgcaaaactctgtccataaaatcccgcgaaaggcttgaaaaccgaaaatttctatgctaaaataacagtgttgcgttgcgaggatacaaacgacgccgaacagtgaaacgcgatgaaaaagaaaagtagcctgtttttcgtgggcagagagggtgcgccgtcggctgaaaacgcgcctgcattgagtataggtgaagttctctttggagtggtgcggctgaaatgaaagtaggttgcaacgggtagctgcgttaaaggctttcagagggcgcaatgcgccgaaattgggtggtaccgcgagcgttccggctcgccccatgttttgtgcatggggcgggcttttttcatgctcaccgttcggtacaaaacggaaatcatttatgaaaggatatattgatatgggaatcaaagaaagcatttccgagctgcgccagaagtttgacgcagacctttccgaagtgcgcgacagcgaatccatcgaaaagctgcgcgtttcgtatctcggcaaaaaaggctccgtcaccgagcttttaaagggccttaaagacctttccggcgcggagaaaaaagaattcggccagaccatcaacacgctcaagcgcgaggtcgacgaacgcatcacagcacacgtggagcgcatccggcaggaggaggaagaccgccttgtcaacagcgcagagcaatatgatgtcacgctgccgatggataccgactgcggctcctatcaccccatcacgctcgtgcagcgcgagctggaagaaattttcgcttccatgggctttacgattgaagactaccgcgaggtcgtaacggattacaactgctttgaggcattgaacattccgaagcatcaccccgcccgcgacatgcaggacacctactatctcgataacggtcagctgttgaagacccacacctcggccgcgcagaacaccatcatgaaaaagtacggtgcaccgctgcgtgccatcttcccgggtcgctgcttccgcaacgaaagcacagacgcttcccacgagaacacgtttttccagatggaaggcatcatgattgataaagacatctccatttcgaacctcatctacttcatgaagaccatgctttctaaggtctttaagcaggacgtacaggttcgcctgcgcccgggcttcttcccgttcgttgagccgggctttgagcttgacatcagctgccacatctgcggcggcaagggctgctccacctgccacggttccggctggattgagctttgtccgtgcggtatgattcacccgaacgtgttgcgcgccggcggcatcgaccccgatgaatacaccggcttcgcgtttggtctcggcctcacccgccttgccatgatgcgctacggcatcaaagatatccgcgacctcaacagcggcaatctgaaggtgctctcgcagttcaaccacgaataagaaaaggagtcgttataatgctgatttcaatgaactggatcaacgacttcgttgatctttccggtctggaccttgaaaagctgattcaccaattcacgctttccactgcagaggtcgaagacatctattatatgggccgcgacatcaaagacgttgttgttgcgcgcatcgtttccatcgaaaaccacccggattccaaaaaactgcacctcttgaaggttgatgcaggcgacaaggtctatgactgcgtatgcggcgcgccgaacgtgcgcgagggcatgcttgttgcctttgcccgcgaaggcggctccgtttccggcatggagatcacctgcgcaaaaattgcaggctatgaatcgcatggcatgtgctgctccgaaaaagagctcggcatcagcgccgaccacagcggcctgtgggagatcacagatgacctgccgctcggcacacagattacggacgcgtacggcgtaaaggacgttgtgttcgaggtcgataataagtctctgacgaaccgcccggacctttggggccactacggcatcgcgcgcgaatttgcagcgctgaccaatcgcgaattaaagccggtcagccgcatggatctcaccccctacgcctctctgccgggcatcgatatcgatatccgcgataaagagctctgctaccgctacacgggcctcaaggtgcgcaacatcatgaagaaggtcagcccggttgatatgcgcattcgtctcttttactgcggcatgcgtgccatcaacctgcttgccgacctcacaaactacctcatgctcgagctcggccagccgatgcacgcgttcgactgcgcaaaggtcgattccattcaggtgcagcgcttctccgctccgttcgagtttgaaacgctggacggcacaaagcgccgcatcgacgaaaacacgctgatgatctgctccaaggaagagccggtcgccatcgcgggcatcatgggcggtctcaactccgagattgaagataacacggacagtctgctgctcgaatccgcaaactttgatgctgtaagcgtgcgcaagtcctccacgcgcatcggtttgcgcacggatgcttccatgcgttatgagaagacccttgacccggaaatgaccgacgtcgccatcgagcacttcatgcagctgctcaccgagatcgacccgggtgtggagatcatctcctccatgacggacgtctatgtccgccactacgacaaaatcgacatcacgttcgataagaaatttgtagaccgttatacgggcatcgatatttccgacgaacagattttgaatacgctttccgcgctcggcttcgcaccgacgcttgaaaacgaagtcttcaccgcgcacgtgccatcctggcgtgcaacgaaggatgtcaccatcaaggccgacatcatcgaggaaatcacccgtgtttacggctacgataacttcaagatcacgaccacaaaggcagctttggcgccggtcatgcgcaccgcgggcaacaatgatgaccgctggacgaaagacctgctcgtgcagcgctacggcatgcacgaagtgcactcctacatctggtgcgacgcgaagaagtacaaggacctcaacatcgagattgaggacaacgtgcgcgttatcaacgccatgacgccggaccacaccgtgctgcgccgctccatggtgccgacgatgatcacctacgtcaacgaaaacaaagcatacgcaaacgatttcggtgtgttcgagattgcccgcgtcatcaacggcctcggcgaagacggtctgtgcgatgagcagaagcacctcggcattgcgctgtacagccgcactaagagcgaaaaggacctctacctcggcctgcgcgacatcatggcttccatcagcaaagagctgaagcaccgttactttgaattccgcatcgcggaagcaaagcacaactggcagcacccgcgcaacaccgcagagatctatctcgacggcacatacgtcggctttatcacggtcgtacatccgtccgtacagtcgaagatcgataagaaagccgtcatcgttgccggtgaactgaacatggatacgctctcctccatggcagcatccgttattcactatgaggagccgtccaagttcccgggcatcgatatcgacctctctctcgtcatcggcgcagaccagacgtacagcacgctttccgccgcatggcagaacgtcactcctctgctcaagaacgttgcgcttatcgattcctacaacggcgtcgtcaagagcatcacgctgcgctttacgttctcctcgaacgagaaaacgctcgcgaagaacgaggtgcaaagctatgttgacaccatcatcgagaacctcgcgaagattggcgttgtgctgagataatttgttaaaaattttcgtaccgcttgctttttttgttgttttgcggtatgctgtatacagtgtttattccactgtgcttttatacgcgaataaaacaccgggcccggcatacaatgaaatgtagactgtatttttgcagcctttacacgatcggaaaacgaggaggtgttccacatggcagaagatttcagcgaccgcacccaaacattcagcattgagacgccgcagaagctcgatatgcagcaggtgctcgtacaggtttacgatgcactcaaagaaaaaggctataaccccatcagccagatcgtgggatatattctctcggaagatcccacatacatcaccacgcacaacaacgcacgcagcctcatccgcaagatcgaccgcgatgagctgctgaaagcaatggtgcgtacctatttgggcgaataagcctgttttctgatgcgccgccgctttatgcacggctttgcctgaaaccgaaattgccgcttggcggatttttccgtcggcggcaatttttattttcaaatgtgcaaatacaagttgtcttttttcttaatctatgctatactgattaaaagtgtattgaatgctttgcaccggtgcttagaaagttccggcattttccccaacgagactttatgaaaggatttgcatactatgagcgaaaagcagaagagcccgtttcccatgtaccgcggcaagccccttgtgcgtagcggcgataccatttactacggaaacatgaccgataaatacgtcatcaagatcgacatcaaaacgaagaagaccgtggaggacatggaggttgccgataagtgcactgtgcagctcatgctcaccgacccggagattcgctccagaaaacagatcgtaaagaccagcgagaagaacggcctttatcttgctttggacatcgccgatgcttggcttacccgcgcattgacagaataagcagttaattccgcaaaaaaatcaccgaggaaaccgtttgtccggtttatctcggtgattttttgctttattctttcattctcggctgcttgccgtgcttttctttgcgctgacgtttgttttggtacatggcaatatccgctttttcgagcatttcgtcatacggcgcggcaacttcatctatgaagcagcagcccatggagaaccgcagcggcacatgctgtccatcgtgcagcacggcttcggagctgtcctgcgcacttttaagctgaagaagcttttcttgcagcgcttcttcgcttttttcttcgaggaacaggacaaattcatcgccgccgtgacgtgcagtaaggccgctttcgcccacgatcttttttaagatttctgctgcggaaatgatatattggtcgccgctctcgtgcccgtaggtgtcgttgatctctttcaagtcgtcaaggtcgatcatcaccacggcgtaagtatcgcctgtacccgcttccaaaatgcgctccacgcggcggctcaggccgcggcggttataaagtcgggtcaacggatcggtgtcacgctcagattcgatctgcatgcggcgctgcatctcctccgtcacgtcgttcaccacgccgaaaacactgctctcctcgtgcgtttcctccagctttatgtagcggtccggctcgcccggaatgcggtatacgttgcgctcgccgaccacgcggctgcagcgcagctcctcaatgaatgtatacaggtgtacgcggttgccagtgtagtacgccgtctcctcatccgtccacccaaaaatctgcgggatacgctccgtgcaatacacctgctgcacgccgtcacgatactcatacacgccgatattcatttccgtgcggctcaaaacatatgacattttgcggtcgttgttgacaaggctgccgaccatctcgttgatgtatcggctgagcgcagaaaactctcggctgctctgcacgttgactttttcctccaaatcgccttgcgtgatgcgactgagcttgccgtttatgcggtgaatgtcatgaataacgtaccgattcacgcagttcgcgacgaaaaccgtcaacgtaccgcagattaaaatcagacatagcgccagattcaaaagatcaagcggaatacgttcgtacaatacgtccatcgggatgatgaaacccatgtaacgggtttctatcttcttaaaaatgcagtagtagtatttcccctcaatattagcgtgaaagccgtgctcctcattttgcatgctctcggcaggaataccgagctttgccacggtcttccccaccatatccgcgttcgttgcgccgatgaccgacagcgtttcactgtctacggcacagtaatcgatcgccgggctgatattgagctgatgaaaaatatacgaaatctcgtttttctccatagcctccgttacaagctgcgggtctttgcccacctgcacgatgaacgtgccgtctgcgctccacacggcggaatactgcatgtttttgccttcagcggtgttcgggccggcatcctgcacaagctgcaaggatttatccgtgagcatcggcgcaaaaaatgccatctgctcaccggaagaaaacgaatagccataatactctggatttgtgccggaaacaatcgtgccggtctcatcaaaaatatgaatttcatcaagttccagtatatccgcatattttttcagctttaaggtatcgtttgttgcctccgggtctttttgcagcagaaacgcaacggcttcggcatcatgcaaacaggtcttatcgtattcttccttgatctgcttcagttcattctcattttcttcgataatctgctccagacgcacaaatgtaccggcagcggtgtcttccacgcggccctgttcaatcagaatttccgcaaaggcgattaccacaaggatcactaaagccatcacgattgccgcagaacgaatatagcgattgataatttgcttcagagatttcataggttcaccgccgtttcgtttaagtttaaataaaaccaaattggttttgagtactgtatttgaaattaagtatatcacatatatcgtattttgtccagaaatacaaattgaaacaacaaatttcacttgttttttgcatgaattgacgtgtttcgcaaggatatcgcaaaagcgtcagccatcgttttaaggatctcccgcccattttacaaataacgtttgaattttgtaaaaagcgcaccgcccacccgtaaagcacggacaagcggtgcgccaaaaattgatatttagctttctgtacgcttcaaattgctttcgccgaaatgcagcagtttttctttatgaatgaagtaatacaccacgcctgtgacatccgcgaggaaccaaccgatcggcaccgaccaccagatgcctgtaacaccgatgacagcggataaaagatatgccagcaccacgcgcgtaccgagcgagatgaccgtcagcaccacgctcataccgggctttgcgaccgcgcggtacaacccgtagagcaggaataagcagccaatgccgcaatagaacgcgccctcaatgtgcaggtagcgcacgccctcggcgataatctccgtttcgcccgcttccacaaacagcagcataagcggctttgcgaacacgaacaccaaggcagacacaatcacgcaaaacacaacggatacaagaaccgcacctttcaatcccttgcggatgcgttcctgcttgcccgcaccgtaattctgcgcgatgaatgtggagaacgcgttgccgaagtcctgcacaggcatgtacgcgaatgcgtcaatcttcaccgccgccgcaaacgccgccattaccgccgcgccgaagctgttcacaagcccctgcaccatcaaaatgccgaggttcatcacggactgctgcacgcaagtcaaaatggaatacccggcaatctcccggatacggctcgcgcggatgggcgaacggctgcacagcgcgcgcagctgcggacatttgatgagcgcgcagatcatgatgccgatgccggaaacatactgcgcgatgaccgtggcccccgccgcacccgcaacgccaaagttgaggccgatgacgaaccacaagtcgagcgcgatattcaaaaccgccgagaccgccaaaaacacgagcggcacgacagaattacccaccgcgcgcagataagacgcgaagtaattatataaaaacgttgcgaaaatgcccgcgaatacgattgcgatgtacgcacgcatatcgccccaaacgtcgtccggcacctgcaaaaagctcttaatgaggtcaagacacgcaaatgcgaggccgtttaaaagcagcgtcacgcctaaaatgagcacgaacgaagcccgtacactttcttttaaggcagtttcatcgcgctgcccgaagcggatggaaaacagcgcaccgctgcccatacacagcccgagcaagattgatgtcaaaaatgtcatcagtgaaaacgatgagccgaccgccgccagcgccgttttgccgaggaagcgccccacaataagcgtgtccgcaatgttgtagcactgctgcaataaattgccgaggatcatcggcagcgcaaaccacagcatagaccgcatcaccggcccccgggtcagatctttgttcatattaaaacctccgcagccagttttatacatcaaaaaagcccgacacaaaagtgtcaggcttttggtgccggcgaccggatttgaaccggtacgatgtttccatcgagggattttaagtcccttgcgtctgccgatttcgccacgccggcttaaattatcttaattataatagcatatcccggctataaaatcaagccattttattccggcatttcatatttttctgtccagccgcgtaaaaaggcatcccccggctaagccgggtactcggaaaccctaaaaaggcatattacggacaacgcggtctgcttggccatttcctttgctccattcataacgtcgttatgaaatatatatccgtaaaatcaaatgtcaacaggcaaatcgaaaaacgtacacgcaagcccaaattctgcgctttcacgctcattctattgctcacaaaaggctgatttcgcaaaaatcgcaaatttttcaactttttgcatttacaaacatgcgctttatattgtatactatgataaaagaccgggcgcaaggcgtgccggaatattccatctataaggagttcgtattatgtactatcttggtgttgacgtaggcggcacaaacattgccgtcggtatcgtagacgaaaacaatgcgatcatcgcaaaggcttcccatccgacgcccgttccgtgctcggaagacgcattctgcgatgcgattctcgctgtatgcaacgacgcacttgcaaaggccggcctgaccctcgacgatgtaccgtggatcggcatcggctgcccgggcaccgttaaccgtgctaccggcatcatcgaatttgctaacaacctctatttcaagaacttcaagctccgcgacatgatggcagagcgcacaaacggcaagctcgtcattctggagaatgacgctaacgcagcagcttacggcgaatatcaggcaggcgcacttgcaggcgcagacaatgcactggctatcacacttggcacaggcgtcggcggcggcattatcatcaacggcaaggtctactccggcagcaactttgccggcggcgagctcggccacaccgtcatcgttgttgacggtcgtccctgcacttgcggcagacacggttgctgggagacctatgcttctgcaacgggtctcatcaaaaccacaaaagagcacatgaaagatgccccgaaggactctccgatctggacaattgttgacggcgacgagtccaaggttaacggcagaaccgcatttgacgctatgcgcgcaggcgacccggtcggcaaggctgctgttgacgagtatatcaagtacctctccgtcggtctcaccgatatgattaacatcttccagccggctatcctctgcatcggcggcggtatctgcaacgagggtgaaacgcttctcgctccggtcagagcattcatcgatagagagcagtatgctatgaactccacgaagaagacgaaggtctgcaaggcgcagctcggcaacgacgccggcatcatcggcgctgcactgctcggtaagcaggaggactgattttcccatgtctcttacaaaatccgtgttcggcacgttcccctgcgggaaaacggctgacgcttatacgctgaaaaacgcgtcaggcgtgacgcttgtgctcacaaactacggttgccgcattttacagcttttaacaccggacaagtccggtaagctcggcgatgtcgtgcttggccacgccacgctcgatgaatacttcggctccgactttcagggcacgttcgtcggccgctacgcaaaccgcatcggcggcgcaacgctcaccattgacggcgtaacatatgcactcgatcaaaacgacggcgcaaacacgctgcacggcggcacaaaaggctaccatcaagtactgtttgatgtgaaagagtcgaacgacggcgacgaaccgtctgtcacgttcacacatgtcagcccggacggcgacgaaaattaccccggcacactgaccgttgaagtgcagtacactttgacagccgacaacgccgtggagattacctaccgcggcaagaccgaccgtaagacagtgttcaacccgacgaaccactcgttcttcaacctgaaagccgacggttccaaggacgtgctttccacgcttgtgacgattcacgcgtctgaggtaacggcggtcacagacgacctcatccccaccggcgagttgctgcccgtaaaaggcacgccgctcgatttcacggctgcaaagccgctcgggcaggatatgttcgcggatgaccacctcatccagctctgcggcggtttcgaccacaacttctgtgtggacggcgagggcatgcgcgagattgcagtagcctacgagccggagaccggccgcgaaatgaccgtctattccgatatgcccggcgtgcagctgtatacgttcaatcgcacttccggcctgaagaacaaagacggcagcgacatggttccccacggggcactgtgccttgagacacagttctacccggattccgtgcatcacgagaacttcccgttccgctatgtcacgccggagaaaccgttcgagtccaaaacaatctataaattcactgtgaaataatgtgggagggctgccgcagggcggccctttccgatttcatcgcctgcggttttccgcggcaaattgcaaggaggtcattttttgaaaaaagaaatttcctgcggcgcggtcattgcgcggcaaaccgaaaacggacgtgaaattctgctcatccgccatgtaaacggcggtcattgggcgtttccgaaaggccatatggagggtaatgagaccgaaagcgagaccgccttgcgcgagatccgcgaggagaccggccttacagtcacgcttgataccggctttcgcgccgtcgtcacttactccccgaagccggacgtcatgaaagatgtcatctactttgcagccgaatacatcggcggcgaagcgcaccggcaggtagaggaagtcaccgagctctgctgggtacctgcagaagaagctgcagcgcacattacgtttgaaaacgataaagatgtgctgaggaagtacagagaatattgcaaagcataacaaaaagagcgtgcaaactttcatctgcacgctcttttcttatgttcatgtagctttaagcgaaattacttaacgatctcgccctcaacggtgccgccgagtgccgctgcattggactcatcggtgtcgatgtgcatagcagccgcatacttcgggctgacacgcacaacaacgtcgccgaaaatcacgctgcgctcgccttccttgccgaccttaacggagacgatctgcttgtcttccacaccggctgccgctgcctcttccacgttgaagtggatgtggcgctttgctgcgatgacgcccttttcaatgacgacttcgcctgccgggcccttcagcgtacatcccggggtgccctcaaggtcgccggactcacggatcggtgctgcaataccgagcttgcgtgcgtcggtcagtgcaacttcaacctgcgtctccgggcgcgtcgggccaaggatggacataacaagggaacccttcgggccgatgacctctaccttctcgttggaagcgtactggccgggctgagagagttctttcttaacggtaagccttgcgtctgcgccaaaaagcgtcttcagatccgcttcggacacgtgaacgtgacgtgcggaggtttcaaccataactttcatttgaaaatacctgtcctttccggattttgtatttctattttactacgaaccgacagaaaatacaagttttgggctatgttttttctccgatttatgataaacttaatgcagaaaagaccgtaatttgaaaaaacgagaaaagccggtgtgaaatatgtttgaaaactgggaagaattgaaagaaaactgcctgaactgccgcaagtgcagcctgtgcgaagtgcgctccaatgtcgtgttcggcgtgggtaacccgtgcgcgaaggtcatgttcatcggcgaaggcccgggccgaaacgaagatttgcaaggcgagccgttcgtcggtgcaggcggtcagctgctcgataaatacctcgccgccgtcgacctcgaccgccgcacgaatatctacattgcaaatatcgtcaaatgccgcccgccgcaaaaccgcgaccccttgcaggaggaacaggaagcctgcatggactggctgcgcaatcaaaccgccctgctgcgtccgaagatcatcgtatgcctcggccgtatcgccgccatgcgcatcatcaaacccgatttcaagatcacacgcgagcacggacagtttttcaaaaaaggcaacatctacatgacggcaaccctccaccccgccgccctgctgcgcaatcccgcacaaaagcccgccgcgttcgacgactttttaaagctccgcgataagatcgacgagcttcaggcagatatctccaaaacatattaaacataaaaaagctgctccgtttttacgcggaacagcttttttcgttttaattataaacttgcatgaaccttacagcagctttgcgcggagcgcttcgccgctttccgggtggagatacgccggagcaacgtcaaagacggtcttgcagcccacctgaccttcactgtgcatgcggtatgccgcgcgggcaaacgctacgagcacactggacgtgaactccgggttggaatcgagcgtcagcttatactcgatgacgtgcttgttttcgccattcagacccgtcacaccggtgcggaacaccataccgccgtgcggaatgcctgaatggtcgcggtcaagctcttcctggctgatgaagtgtacggtcgtatcgtaatcggagaaatagttcggcatcgtgacgatggctttctcaatggcagctttgtccgcaccctctttggcaacgacaaagcactcgcgggtgtgcttctcgcgcgtcgtcagctccgggttctcgccgcggcgcacgcttttaagcgcgctctccaccgggatagtatactggcgggcatcctgtacgccgggaatgcggcgaatcgcatcggagtgaccctggctgacacccttgccccagaacgtgtagtctttgccgttcggcaaaatcgcctgaccatagaggcggttcagagagaacatacccgggtcccaaccgacggaaatcatgccgaggtggccgctcttcttgcaggccgcgtctacgtccgcaaaatgctccgggatcttcgcgtgcgtgtcaaagctgtcgatgacattaaaatactgtgcaagctctgcggtttgcttcggcagatcgttcgcgctgccgccgcacaggatcatgacgtcaatcttatccgtcatgttttttgcctgctccatagaataaaccggcacgccggtcttcgtcttcacactgtccgggctgcggcgtgtgaaaacacccacaagctccatatcttccgtgtgggaaagcgcactttccacgccgcggccaagatttccgtatccggcaatgccgattctaatcatttttatcgctccttcatgtatctttcaaaatcataacagcgcaagttagtttacactacgatttcaatttctttatctattatacgcaaacgcacgatattttgcaagagaaaatgcaaggaaacttgaaaaagccgtcacaaaacagctgttttctgtcttgtaacggcttttgtctttttagttttaacgcaaaatcagcgaatgttatacacgctgcgcatatgaataccgtttgcatcgccgctcacaatgcggatgcggcgctctttaccggcttcgaggtcgaagtagttgtcttcaagcatccagtcctcgttctcgttcagtacttccacgctcttcgcgtatgcctttgcggaaacgataatctcatcgccctccacacggcaggaaagctgcgggtcgatgtaatcgtaatacttcggcacggagaacagcacggtggattcggagatcatctcgccgttctggtagcacgcatagtgcacatggtcggtgaacatgttcgcttccggcagttctacggtatcgagccacacggtgtccattgcgggcacggtgatttccacctcgccgccgtcgcgcagaacctcggagcggttgttgcgcagctcccacttcacggtgaccgtctgcggctgcatcgtctcattggagacgttcaggcggatgctctttacggtgtcggtgttcaagtcacgacactcgcggttcgggttcgggtcatccaagaagcccttctcttcgcaggagagcagcaccggcgcgaagaagcgcttttcatagtagtgcagcgccttccagcggccgaagtagtcgatagacgaccaagaagcaaccggccagcagtcgttcagctgccacacgatcgcgcccatgcactgtccgcgatgacggcgccagtgctctacgccgtacttcatcgcctcggcgctcaaaagctgcgaggtatacagcagcgtgccaaggccctcagtcgggtaacggtacgtctggccgagatatgtcatgatcttgctgttcgctgcgttgttgcgctggtgcttctccatgacataggagaaaatatttctgtcttccggctccgtaaaggattcgaccgttttcagcgtcgggaacgcctggaagccaaactcggaaacatagcggaagttgtggttgcggtagtccgtaaacggcagactgccgtgccaaacgtcccagtagtgcacatcgccgcgcgtctcatcggtcgggttgtcaaagtcgccgccggaggacgggcttgagggccaatagtacgtctgcgggtcaagcgcttttacggtcttcggcagaatgtactcgtaaaggcgcgtgtagttgcccttctgcttcggggtcaactcccacatcggcgggtggcccgtcgggttgttcggcatcagcgccaaaccgccgaagaatgtgaacatctccatctcgttgttgccgcaccacaggccaagggaagcgtggctgcggatgcgtttgatgttatcgttgaactccgcacggagattttcttcaaactcgtcgctcaaattgtaatgtgcgcaagcaaacatgaagtcctgccaaatgacgaggcccagctcgtcacatacatcgtagaatgcatcgctcgggtaatggccgccgccccatacgcgcacgcagttgtggtttgccgccacagcctgctcaaggagctttctcgtacgctccgggctcgtgcgcggcagaatgttgtcctccgggatatagtccgcacccatcgcgaagaacgtcacaccgttcacttcatgcgcaaagctctcgccgtaccggtctttctcaatatgcatcgtcatcgtgcgcagaccgatgcgcttttcccatgtatcaacggtctcgctgtcacgctgtaaatcgacacgcaccgtgtaaagcggctgctcgccgaggccatgcggccaccaaagctgcgggtcttccaccgcgatctccttcggggagcctgtgtagaccttctcctcgccgttcggcgtcgtgagcgtcacggtgtaggtcagctccgcgccgtttacagtctcgatctccggctcaataccaagcgttacggtgttctcgccatgcgtctgcttcacgtatgtgctgatgatgcggccgccgttcacgccgcaaagcataatatcgcgccaaatgccggcatcaggcaggcggggaccccagtcccagccgaacatgcagtgcgccttgcgcaggttcgggaagccgaccattgcgtcgccgctgccgcccgcgtggcagatcttatcctgctctttgatgtactttgtcggcgagtgaaacacaatctcaagcgtgttgccggtcgttttcaggctatcttttacgtcaaattcccacgtgcggtgcatgttgcacacgctcgcgattttctcgccgttcaaaacgatgtcggcaatggtgtcgaggccctcacagcgcagcagaacgcgctcgctgttcaaaacgtccgcattcacgtcgaacgtcgtattgtagcgatagtcctcgtccatcagcgccaacgctttcatctcgttgtcgcgccaataggggtcttccatgcgacccgcgttcagcaggtcattgtacacggagcccggcacggtcgcggggatcgtgtcattttttccgacggtcgtcagctgccagccggaatgtaaaagctgttttttcatttcttttatcctctcgttttatccgtcaaaacgcgcgaatttctttcttcactttcgttttaatcggtctatatgcagtatagcaccggttccacaaattgtaaagcgactgccgttcctttattccggtaaagcaaaaaattcgcaaaatatcgaaaactccatcgatttttcgtgtagttttcaggttaaaaagcgcaatatccttattctaaataaaccgatttatagaactccccatcgcccatgtgtccgtcaatcgcacgccaacgcagcctagctgcacatatgatcgtcccgtcatagtcctctatgtcatcttccgatatattttgttcatcgcaccaatagatgtccctatcctttatcagcagcgttgaaccaaaaatctcacaagtatattgctcatccacaggagataaattcagatatttcagtcctgcaaattccatctcgatcatcgaaacatcttcgaattggcgctgaataattacattcaatacccgacgatcatttaacggatacattctcaaatccgcatctacagatgctccgcttacataatgcatctctttaatacagctatcgtgaaacgcatagactttatccataaaatctctaatatcctgttcactgcgaatttcattccacatagataacacctttcaacagaatacagccatcgcacctaaattcaactattccagtctactcgccgcttccgatacacttttccaaagcaaattgaactctttttcagtctcatcatatcatattcgcctgcactgcacaagcaaaatatttccagatataacaaaaaagcacctacaaacgtaagtgctttctttctggaggtgacacccggatttgaaccggggaatcagggttttgcagacccttgccttaccacttggctatgtcaccattttgaaaaagacgccttatcttcagcgtctttttcttttggagcggacgacgaggctcgaactcgctacctccaccttggcaaggtggcgctctaccagatgagctacgtccgcgtatggtgcctccgatcggaatcgaaccaatgacacggggattttcagtcccctgctctaccaactgagctacagaggcaaatgtggcgacccggaacgggctcgaaccgtcgacctctagcgtgacaggctagcgttctaaccagctgaactaccgggccacatttggtggggacaataggactcgaacctatgaccccctgcttgtaaggcaggtgctctaaccagctgagctatacccccaaacagcatcgcttttcagaaatctttcaacagaacttgcggttcttttgaagtcttatgtcttccagcgacgttgtatatattaccacatgcttattaaaaagtcaataccttttccaaaactttttcaaaaaagttattttgagacatttttacgcttttcgcgcacgatttcggcaagctcgtgcagctcctcttttgtgaagtaatacttgcggcagcagtacggacacaccgcttccaccttgccgtccacagccggcagcgtatcgatttcatccggctccaaggtcgcaagggcattataatacttctcacggctgcatgtgcaggcgtagtgcacggggatttcctccagcttttcgacttcaaagcccgtgagcgccgtgtcgaccatctgctccacggtcatgccctttgcaagcatggtggtgacaggctccagcgttgcgatattcgcttccagcttttcaatgtcctgcggcagcgcgccgggcagcacctgaataagcaaaccgcctgcaagcagcacgccgttcgtattcgggtctacaagcacgccgagtgcgcacaccgtggggatctgctcactcacggcgtaataattcgtgatgtcctcggcgatctcgccgctgacgagctccacttgacccatatacggctcacccgtaccgtagctgcggatgacaccgaggcggccgtctgtaccgactgcggcgctgacatccagcttgccgttcggcttcaggggcacgtctacgttcggattgtccacacagccacgcacattgccgtggctgtcggaaattgccgtgacggtgccgatgggaccgccgccgtttatgcgcaacgtgagcgtggcatgctcttgcttttgcatagcgcccatgacggacgccgcggtaagcagtctgccaagcgcagcggaagccgtggcgctgaggccgcgcagcctctgcgcggtatataccgtatcgcttgaatcgattgcggaggccataagtgcaccgtccgatgtgatgcagcgaataatcctatccaatgaaattcttcctttcggagcgttttacggagcaatatcgtccttaaaaacgccgttttgtgagtttgtgatgtgtgcggcgaaaataatgcgctgctcctccggcttcggcgcgtcgaaagagaggtcaccgaagacctccaccctatcaaagccggactttttcagcatttccgtcagcttctccacgctgtatgcgtgctcaaagaaatgctcgctgctgcgcgtatagaccttgccctctttctcaaagaaatcgagagagatcgccacactgtgatgctgcggattatagcggttctgccatgcgcagtaaatatccgcaaggtcgtaaatataggtgttgttgcccagcaccttttcgtgcttatagagcgtgtttacgtcgaaaacgaaccagctgtcgttatccatgaaaaacgccacgcggtcaaatgccgcctgcacctgcgcttcgccggagaggtggttgatgctgtccagcgaacagaacaccgtgttgaccgtgccgaacaggtcgagcgtctgcattttctggcagaggaacatcacatcggcttccatgtcgtaagccttgtccttcgcttcggacagcatggcaatggagccgtccacgccgtacacatccatgccaagcttataaagctccagcgtaaggctgccggtaccgcaggcaaggtctaagacgatgcccggttcatggtggagatgctcgagcagcttctttaaatacgccgcgcgacccttataatccacgttcgcggtcaacgcatcgtaatagcgcgcaaaaacgtcgtagccggccattagtcctcttttccgccgccggtcaacaggcgctcaaaaatcagcgtgtagccgtcgctgccgtaattcaaagagcgattgacacggctgatggtcgcagtggaagcgccggtcttatcgacgatgtcgctgtacacgtggcgctcgctgagcattttggcaaccgcaatacgctgcgacatggctttcagctccggcacggtgcagagatcttcaaaaaatttatagcattcctcgcggtttttcagcgtgagaatagcatcaaaaaggaaatcaacgttttcatcatgcagtttggtattcattgtttctgtgttcctttctttatgaatttgcatccgaaaacggcgcatttatgccataaagcaccaaatgcgccgtcttttcgtcaacgaggttctttacttttttattttaacatacaaaagcacaaaagtaaacaccgaaatcaagaaatttttgcacagcagtgcgtgaaatcacacatcgttgcgcacgaggtcttcataggtctcccctttgatgatgacacgggattctccgccgcgaaccatgacgaccggcggacgcgtgttgcggttgtaattcgatgccatggagtagttgtacgcgccggtggagagcaccgccagaatatcgccgacctcgggcttttgaatgagcgtgttctcctgaatgaggtcgccgctttcgcagcacttgccggcaatggtcgccgtaaagtctgcgggctcgttcgccttatttgcgataaggcaagtgtaatccgactgatagagcgcgtaacgcgggttttcatacataccgccgtcaatagccacatatgtacgcacattcgggatggtcttgatatcgccgacggtgtacagcgtgaggccggcctcgcacacgatggagcgtcccggctcaatgtaaatatacggcacctgaataccgtactccttgcaggcagcatgcacggcttcggaaacgtcgctcatgtaatcttcatacggcacggctgcatcggcttccttgtactttacgccgaagccgcctccgagattgaggtgtgtcagcgttttgccgagctctgtatggatcttgttatagaacttcagcatgacctgcgccgccagcacgaacggggctttgtcgaaaatctgcgagccgatgtggcagtgcaaaccgatgagctctacattttcgcacgcgacggcttcctttacggcttcaaacgcctcgccgttttcaagtgcaaagccgaacttggaatcgatctgacccgtgcggataaactcatgcgtgtgggcgtcaatgccgggcttgatgcgcatggaaatggacgtaacgacgcctttttccgcagagagcttttcaatgcggtgcagctcgtttaagttatcaacgacaatgtcgcctacgccgctttcaagcgcatagcggagttcctgcattgttttattgttgccatggaaatgaatgtgttttgcatccacacccgctgcaagggcggtatacagctcgccgccggagacgacgtcgaggtctaagccttcttcggtcacgatacggcaaatctctttgcagcagaacgccttactggcatacagcgcggtgccgtttccattatagtggcgctcaaacgaagacttatagcggcggcaaacgctgcggatctcatcttcgctcatcacatacagcgcggtgccgtacttttcgacaagctccacggtgtcgcagccgctgatcgtcaggtggcctttttcattgacattgtaacaatcggatacaaacatatttttcattcccttcaaaaagtggtggatctatactttgcagctgctcagttacccaaaatggcagcttcgatgtgctgtttcagcgtctccaaaccgaatccggtctgggaggaatacgggatgaacgggatttcatgctcacggaacaggtcctcgaaatacgcgttctgcgtgttgaactgcgttttgttcagcttatcgcttttcgtacagacgacgaggaacggcagatcacgctcgataaggaagttaatcatatcgaaatcgtccgcagtcggctcatggcgcatatcgagaatttggatgacgagcgccacgttgcgctctgcatcaaaatatccctgcatcagctttgcccagcgctgcttttcgctttgtgaaaccttggcgtagccgtagcccggcaggtctacaaagcggcactccggcagacggaaaaagttgatggtcgccgttttgccgggcgtggcgctgacgcgtgcaagcgccttgcggttgacgagcttattgatgagcgaggatttgcccacattggatttaccggaaaaaacgatctccggcaagtccgactttttgagctgatccgcgcggccggcggcagcttcaaattctactgactgaaaattcacggtgttccccttactgtctgagtgtctgtacgccgtgcgcgggctccgggcaaggcgtattcggcttggtttctctgtttaaaagcccgggcatggcgatgggcagtacctcatcgatacggcgtaccggcacaaaccgcacgttatccttgacgacctgatcgacttcggcgagatccgcgatgttcccgtgcgggatgatgacggtcttcatgccgtttttatacgccgccatggatttttcgcgcaggccgccgatgggcagcacgcgcccctgcagtgtgatctcacccgtcatggcgatgtcgtgcgcgatgggctcttcgcacagcgcggacgtgacggcggttgccatggcgataccggcagacggaccgtccttcggtacggcgccctccggcgcgtggatgtggatatcctttttcgcgtagaaatccgggctgatgccgagcgtttccgcgcgggtgcgaatgcaggtgatcgccgttgtggcggattccttcatcacgtcgccgagcgagccggtgagctgaattttgcccgtgccgttcatcacggcaacttcgatgggcagcagctcgccgccgacgcttgtccacgcaagaccgttcacaaggccgatctcgtcgcggcgctcttctttatccttcgcaaactttgccgggccgagcaggtcttcaaggtcggcgggcttcacggaataagacctgaaatcttcctccgtgacgatgcggcgcgcgactttgcggcaaatggtgccgatggtgcgctccaatgtgcgcacgccggcttcgcgggtgtagtcttcgatgattgcgtgcagcgccttcggtgtgaagcgcagctgcgccgccttgatgccgtgctttttcagctgcttgggcaccaaatatttcgaggcgatgtggaacttttcctccgccgtgtagctgccgagcgtaatgacgtccatgcggtcatacagcgggcccggaatagcggaagcgtcgtttgccgtggtgacaaacagcacgtggctgaggtcgaacggcaggtcgatgtaatggtcctgaaacgcgctgttctgttcgggatcgagtacctcaagcagcgaagcggacggatcgcccttaaagctctgaccaagcttatcgatctcatcgagcaggatgagggggttattcgtgcccgcctgcttcacggccgccatgatgcggcccggcatggagccgacgtaggtgcggcgatgacccatgatgtccgcttcgtcgcgcacgccgccgagggaaacacgcacgtacttgcgaccggtcgcctcggcgatggagcgcgcaatggacgttttgccaacgcccggcgggccgacaaggcaaatgatctgccccgtcgcctggtcagagagcttgcgcacggcgagcgtctccaaaaatcttgctttaaccttttccatgccgtaatggtcgcggttgagaattttctccgcgcggtcgagatccaagcgctctttggagctcgtgttccacggcagctcaaggcacgtttcgaggtacacgcgcatgacggagccctcatgcgagccgtatggcattttggcgaggcgatcgcactcttttaagagcttttcgcgcgcgacctgcggcaggtttaatttttctattctctggcggaattcgtcggattcctcctgcgggttatcctcttcgccaagctcgcttgcaatggcgcgcatctgctcgcgcagcatgtaaacgcgctgattttcatccatttgctcctgcgccttttgcgaaatctcacgttcgagcgatagtactttgatttcatcgctcaaaatatcattgagttttgcaatgcgcttttccgggtggagctcgtcgagaatgcactgcttctgctcgaaatcgagcgagatgttcgctgcgataaagtcggccaaatcaccgcagtccttctgctgcataacgccgagcagaatatccggcggcacctgacggaaccagcggatgtactcttcaaatctctcctgtgcaatgcggctgagcgcttccgttcttgcggtgtggcgtgcggcgatcggcttgcacacgcacacgctgcccgtgaggtacggctcattttgcacaacggacataatctccgcgcgctcgacgccttccacatgcagcttgatgccgttatctgcggtgtgtaccacttgcttgatgcgggcgatgacaccgattttatagaggtcttccgccatgggctcgctttccgaaaggtcagtctgcgtgacgatgaacagctcgcggctatccgtatccagcgccgctttggcggccagaacggacttttttctgccgatatcaaactgcacgatcatgccggggaacacgacgagtccgcgtacggcgagtaccggcagaactctctcttcctcaagtatggtttctttcataaaattatcaaatccttataaatcagacaaggctgcgcagcagggatcgctgcacagcctgtatgatgatcactatgatgccgaatccttgcgagcgcgccgtttgggttgtgtcattttgatctttaccgggacgcggtcgggattgtgcacgatttcaggcgcagcgccgttctctaccgaatccttggtaacggtgatcttttcgatcgtataatcgctcgggacctcaaacatcaggttcttcagcgtatcttccataatggaacgcaggccacgggcgccggtcttgcgggcaatggtcttttccgcaatggcgtcaagcgcttcgggtgtgaactctaaatcgaccttatcaaggtcaaagagcttcttatactggctgacaaggcagtttttcggctctgtgaggatgcgcacaagtgcggctttgtcgaggtcgctcagcgcggtgatgaccggcagacgaccgacaagctccgggatgaggccgaacttgacgaggtcatgcggggtaacttctttcatccactccgtgttatcaagctcgtctttgctcttgatgaccgagttaaagcccagcgtctgcgcttcggtgcggcgctgaatgacgcttttaaggccgtcgaacgcaccgccgcagatgaagaggatgttcgaggtatcgatgttgatgacctcctgctgcgggtgcttcctgccgccctttggcgggacgccggcaatggtaccctccagaattttgagcagtgcctgctgtacgccctcgccgctgacgtcacgcgtgatggacgggttttcggactttctggagatcttatcgatctcatcgacatagatgatgccgtgctcggcacgctcaatgtcgtaatctgctgcctgaatgagacgcagcaggatgttttcgacatcttcgccgacatagccggcttccgtcagagtcgttgcgtccgcaatggcgaacggaacgtccaaaagctttgcaagcgtctgcgcaagataggtcttgccgacgccggtgggaccaagcagcagcacgttgctctttgcaatctccacgccgccgtcttcaccactgaagaaaatgcgcttatagtggttatagaccgccaccgcgagcgtcattttggcttcgtcctgcccgatgacgtattcatcgagctgctttttgatctcctgcggcttcggcagcaccatttcggcgcgcggcttgtttttcggctgcgggcggccgcggtggagagaatcttcatccgcgatgatatccatgcagagctctacgcattcgtcacagatatacacgccgttgccggagatcaggcgctttgcctgcgactgcggcttcccgcagaaggagcagcgcacttcgttatcatttccgaaattattcggcatgaaaacacgccctttcgttatttcgatttcgttgcgatgaccttatcaataaggccgtactccatggcctgctgtgcggtcatgaagttatcgcgctccgtatccttgcagatgacttcgtacggctgacccgtacgctctgcgaggatggtgttgaggctcttcttcgtctgaagaatacgctctgcctgaatctggatatccgtagcctgaccctgcgcaccgccggacggctgatgaatcataatctcggcgttcggcagcgcatagcgcttgccctttgcgccggcagccagcagaaacgcacccatggaagctgccatgcccatgcagatggtggaaacatcgcacttgatgtactgcatggtatcataaatcgccatgccggccgtaatgacgccgccggggctgttgatatacaggctgatgtccttatcgggatcctgaccctcgagatacagaagctgtgctacgacaaggcttgccgtagtgttgttcacctcgtcgttcagcatgatgattctgtcgttgagaaggcgggagaaaatatcgtaggaacgctctcctctgctcgtctgctccacaacataaggtaccaaactcatcgtacaaactcctttcgcgcttcttttgcttcgcccgctgtccgatgcagggacagcgggcgaaagaagcgatatatgatatgctgttactataatactaaccgtaaaggcggtaaattattcctcggtcttagcttcagctgtttcctcggttttttcttccgctgccttcttggtgctctttcttctggtggtcttctttgccgacttttctgcctttacggaagcgttttccttaacaaagtcgatcgccttctggtttttaaggtctgctctgatctgcgtctctgcaacgaggttcttgatctgcgcgacttccatattgtactgctttgcgagtttctcatactcttcctcaacagcctcatcggaaacttcgaggttttcaagctcagcaatcttctcaagtgcgagtctcagcttaagctgcttctcggactgcggtctgaactgctccttgatggcgttgacgtccatgccggtgtacttgagataggtctcgaggttcagcccctgagactggagacggtatgcgaagttgttgatgctctcctcaacttcctgctcgtacatctcttccggaatctcgccctgtaccttctcgatgagtgcatcaaagatctggttctcaacgttcgtctcttcctgcttctcgcggtcgctctgcagcttctcgcggaggctgttcttgtactcgtcgagcgtatcgaactcgcttacgtcctttgcgaactcatcgtcgagggtcgggagctccttgcgcttgatctggtgcagcttgatcttgaaggtcgcgtccttgcccttgagctcttctgcctgatagtcctccgggaacttcacgctgatctcgaactcgtcgccaacttcatggccgacgatctgatcttcaaagcccgggataaactggccggagccgagggaaagctcgaagccttccgctttgccgccctcgaaagccttgccgtcgcagaagccctcgaaatcgatgactgcggtgtcgcccgtaagcgcacctctgttatcgacgtcgaccattctggagtttctgtcctgaacctttacgagctctgcgctgacgtcttcatccgtaacttcgacattcttcttcgtagcctcgatgcccttgtagccttcaatggtaatcaccggcttcacaacaacggtgagcttcagctcgatgccgttctcgcgggaaacggaggtaacgtccgcattggaaaccgcgatgacttccagaccggaagcttcgatagcgtcctgcatagccgggcgatagagcttgtccacagcagcttcaaagaacacgttttcgccgtacatcttctcgatgacagatctcggagcatgacccttgcggaagcccggaacagacatcttcttgccctcggtctttgcgacctcggagagtgctttgttgaaatcttcagcggagatttcgacctccagctcatacttgttggtttcggttttgttggttgcctttaagttcatttccttctatcctctcaaaaataaattacaattttatttggaacacgcgggcggatatacccgtaatgcgcgataccttttgacattatagcacacctgcgccgaatattccagacaaacctttgaattttttgatattttataatttgttaaaaattcagccgatttctgcgtcttttcgcaccaatttcggggtgaaacggatataatcacacgagacaaggtgcatttttatgcccccatattcaccaagcggcgctttttttgcggcgtgatcgccgtgaatgtgcccgtagtagcactcctttacgccgtatgtctgcatcgtatccagcaattcccggcactgtgcggtatcgtacgccggcgggtaatgcaggaacacgacgggtgtgccgccgagggtttttgcggcgtttaaggacgcgatgagacgcccgttttcgcgcgcgacgatttttttatcctctgccgtttcggcgttatagagccagccgcgcgtgccgcagaccgtaatgtcccccacacgctcggcggaattgaacacgagctgcatcgttttgaagcccttttgcgcaaagaatgtctcgatcttgttgcgcgtggaccaccagtaatcgtggttgccttttaacaatagctttttgcccggcagactttcgatgaacgcgaaatcctttccggtctcttccagccgcatgccccaggaaatatccccggcgatgacgacggtatcctcttcggtaacgagggcgcgccagtttttctccagccgctccacatagttttcccagccgcggaacacatccatcggcttatctgtaccaagggaaaggtgcagatcggcgatcgcgtacagcgccattttacactctgaccgtttcgcgcacaaaatctgccatatcggcagcggcgcaggtgttttcaaagcggacgggcttcgtccttaacgctgtgattggcgcggggatctttgtgtttgaaagctttgcgagcagctcggcctccgcaaacggatctacgggcttttcgcaatcgaacgcgtcgagcacgctgtccgggaatttatacgggcttgcagtggaagcaatgacggcgggcgtgttgtcgccggtctctttcaaatactgctcgtaaacgccgaccgcgaccgccgtgtgcgtatcgcacaggtagccgtctttttcaaacgtattgcggatgatctcaaccgtttcctgatcatcgcagcagccgccgtagaacagcgcgcgtacggcatcggccgttgcggcgtctacggtgtatgcgccgccgctttgcagggcgttcatccagcccgtgagcttttcggtgtcttcgccgcacaagtggtagagcagtctttccagattgctggagaccagaatatccatggacggcgaaatggtggtataaaacgcgcgttttttgtcgtacgtaccggtgcggataaaatccgtcagcacgttgttgctattcgacgcgcagataaacttgtgtaccggcagacccatgcgctttgcatagtaggaagcgaggatgttgccgaagttgcccgtgggcacgatgacgttgattgcatcgcccatcttaattttcttcgcattcacaaggtcgaggtacgcggagaaatagtagacgatctgcggcagcaagcgaccccaattgatagagttcgcactggagaacatcttgttgtgctgcgcaagttcggctttgagcgcgggatcggtgaaaattttcttcacgccggtctgtgcgtcgtcaaagttgccgtggatagcgcacacgcagacgttttcgccctcctgcgtgttcatctggcgcttctgcatggggctgacgccgttttcggggtagaacacgatcatctccgtgcccgcgacgtccttaaatccctcgagcgccgccttgccggtatcgccggatgttgcgaccagtatgaccgccgtttttccatccgccgtctttttaagcgagcgggtcaaaaggtgcggcagaatttgcagcgccatgtctttaaacgcgcaggttgggccgtgccacagctctaaaatatgtttattttcgccgtgtttatcgagagacacgaccggtgcgggggtgttatcgtcaaacttaccgccgccgtaagcgctttcggcgcacgctttaatctcctccggggtgaaatccgtcagaaagcgtgagagcacgtactcggcacggccgatgtaatcgagcccgagcatgtcgtttaagtccgctttcgggaagctctgcggaacaaaaaggcccccctcctcggagataccctgtgcgatggcctgcgccgccgtcacctgaagcgcggcgtttcgtgtgctgttgtaattcatggcatccgcctcctaaatcaagtcagtcgtattatactgtattcaggcgttcctgtcaaagcgtttgaagaaagacgccgcattttcaaagaaaattttatccacaagcgcttccggcagattatgacgcaggaaaacgtttgcaatgtcctctacggattcgagacctgtgatgccatgcggcatgtcggatccgtcaaaatcgctgcccatggcgatgacgtccgcgccgccgagggacaaaaagtgctctgtgtgcgcgaacaggtcttcaatgtccgcctttgccgggtcatcgttcaagaatgctttgaaatagttgagacccacaaggccgccgcggttgcagatgatgcggaactggtcgtccgtgaggtttctcgggtgcttgcagagctccttggagttcgagtgcgtcgcgatgaacgggcgctcggtgttttcggccacgtcataaaagagtgcttcggaagcgtgagaaacgtcaataatgatgccctctttttccatttccttcacggcaagcttgccgaacggcgtaaggccgaatttatcgccggacatgacgccgctgccgatctcattgctgccgttccatgtgagcgtcataacacgcacgccgttttcgcgcaggtggtgaatattcttaagatcgccggcaacggcagagccgccctctacggtcaaaataaacgccgtgccctgcttgtcgccgagcttttcgaggtcttccccggtctcaagcacggtgaacgcgcccgtctcggccattttgcggaaataggccgcatggcggtcaaaatactgcaaagccgcagcgccgcgcaccgaatcgggcagccacacggcggcgcactgcacatacggcgcaaagcggtcacccttctttacgctgacgtgcaggtcattgtcgatcaaagatttgttttggtcaaggcacgctacaagcgtgtcacagtgcaggtcaaaatagcgcatgaaaagcaccctttcgtcatttttcgcctttaaaagcgaatttgattttaataaaaagcgttttcgagatattcaatcttgactaacgctccgttttcggtaaacacggcagcggcatcaaagcgcggctgcaaattcgtttcgtggttgatgagataatactgtgccgttttgatgaccttcgcgcgcttagaggacgtaatggcttcaaacggatggctgaggccgtctgcgctgcgggtcttcacctccacaaacgcaaggtaacgatcattctgcgcgatgatatcgatctcgccgaagcggcacttgaagttgcgctccacgatctcgtagcctttttcttccagatattccgccgtcagctgctcgccgaggcggccggaaccggtgtttggcatatgcgcacctcctcagcccagaattttctttaaaaacgtcttgcggtggatggggcacgggccgaattcgcgcagtgcttccacatgcactttggtgccgtagcccttgtgcttctcgaaatgatatccggggtattgctttgcgtattccagcatcacgcggtctcggctgactttcgccaagattgatgctgccgcgatgctggggctttttgcatcgcccttgacgatggtctcgcccggcacgggcatgggcggcatacggttgccatcgatgagcacataatcgcacgctttctgcatattgtcatacgctcggcgcatggcgagatatgtcgcctgtaaaatgttaatctcatcgatctctttttcgtccgcaaagccgataccgtaagcgacggcattttctttaatgacgtcaaagagcgcctcacgctttttttcgctcagctttttggaatcattgaggccgtcgatgacaagcccctccggaagccacacggcagctgcgtaaacggggccggcaagcggaccgcggccggcttcatcgataccgcagacggcggtatagccttttaaataggcttcatgttcaaaggaataatccatggaattttcctttccgatattactttaacgggcggccgacgggctctaatgtgatgcgtccgagcttgccgccgcggtattcgtccaacacgttcacggctgcgcgctcggtatcgatttcgccgccggaaatgagcataccgcgctttctgccgatgcgctccagaatttcgtgacccttaagttcttcttcgggacgaatatccgttttataacgcgtgttgacggcttcgggatataagtcctgcaaaagctccaacaggcggtaagaaagtccctcaatgtcgagaatttcgtcgcgcacggcaccggtgaacgccaaatgttcgccgacgaccggatcttcaaacttcggccacagcacgcccggtgtatcgagcagctcgaggcccttgccaatcgtgaaccactggttgcggcgcgtcacgcccggcttatcctgcacggcagccttgcctgcgttgccgcccttacaaaggcggttgatgagcgacgattttccgacattcggcacaccgacaaccatgatacggatgggtctgcccaccatgcccttgcgttcccatgcggcaatctgctcacgcaggatgtttttgatctccggcagcaggcggtttaggccctttccggtcttgcagtcgattgggatggcgacggttttatgctgtttaaaataatccacccactccgccgtgcgggcgggatctgccatatcggatttattcagcagcacgattttgggcttattgccgatgatacttttcagcaccgggttgcggctgctgacggggatgcgggcatcgataagctctgcgacaatatccacaagctttaggctgctttggatggcgcggcgcgttttcgccatgtggcccggaaaccactgtaccgattgtacttcactcatactgtatcctctctgggtatcttgttttcttagttgttctcattcgttttcacaaaaccgaagcgatcgaacgggtaaagcgtgaacacggcttcgcccatgatatggcgcgtgtcgatcatgccgatctccgcataacggctgtcccttgatacggtgcggttatcgcccaaaacgaacacgcagcccttcggcacggtctgcgggaacacgagcgcttcatatccgtcatacggatggaacgtgatgccgttttcaatgccgaactgcgtttcgttcagcgcttcgccatcgatatacacggtgccggtgtcgtaatcgatattgaccgtctgcccctccgttgcgatgacgcgcttgatgatgggctcctccaaaacgttcgtgacaacgaccacggtgccctgctcgatgtcgtgcccgaggttcgtgacaacgaccttttcgccctctacaaaattcggcagcatcgacttgcccgtgacggtaacaacacggaacaggaacgtgaacacaaggatgacggccacaagcgcaaagacgatctcctccagccactcatacatggagcggacgcctttagacgcggttttgatgtttttttccatgcagctttcaccaatttctgtttttacagtgtattatttctatataaagtaaaaaagggacaaagcattgccccttttactccgtttgctattcgatttagcgaacctggctcttgaccttagcagccttaccgacgcggtcacgcagatagtagagctttgcgcggcgaacacggcccttacggacaaccgtgatgttctttacgttcggggaatgcagcgggaatacacgctccacgcctacgccgtaggaaacacggcgaactgtgaaggtctcgcctacaccggaacccttgcgggcaataactgtgccttcgaactgctgaattctttcacgctcaccctcgcggatgtttacgtcgatacggatggtatcgccaacgttgaactcaggtgcctgctccttaacggaatcggcagcaataagctttaatgcgtccatttgatcttcctcctgataatttttcagacattcatgcggtacgcgccgcagaggactgtccgcttcaatgacgcggtttgcaccgtgcattgatccccattggcagcgtttgagggccaacggatttcaaatgcttaaatagtttatcacaacatgcgaaaaaaagcaagtgttttttaacggaaacccgcacaaagatcgcgaaaaaatgcagataaactgcgcattatgcgaaaaacagacgtgattttccgccgttttacttaaattcgcgaaacgcgctgtcgaaaagccgcgtgcgctccacgcggacaagcaactcgcggttcagtacgcgctctgcggcgtccacaaagagcgtcgggttaataccgccctggttgcccgcaggcaggcgcaccgtcatttcaaggcagtttggtttttcttcaaacgtcatgttttcaaagtacggcttgatatcgacgatcttttcgccctttttggagtgcttctttaccgtaagctccggctcggcaagcacgcgctgcatctcgcttttttcaaacgccgggtcttcgcactccagacgcaggatgtactcggcgtttgcgacatcgttgcccttcatttcgggttccgtcaccgcccacacgcggatatcatgcggcaggccggcgttcaatttttcgatgagctccggatacggcatgtcctcaatgaggcgaatgtccatcgattcgtgacggccctcaaagccgagcgaaagcggggccgcgaacgtcaagaacacgtgcgggttaaagccctccgtgtaccacagcggcagctttgctttgtggaacgcgcgggacatgcagcggtttaaatcaaggtgcgaaatgtaccgtgccgtgccggttttggaaaaccagactctaacatcttttctcaacgcaaagacctcctttaaagcaggctgcaccgcaggcagaacatttttcgcggcagttcggcgtcgtctcagacgcataggcgcgcttacattcctcgatgagaaattcctttttaatgccgtaatcgaggtgatcccacgggaagacctcatcaaagctgcgctggcggtttgcgtagaacgcggggtctatgccgagatctttaaagacctgcatccacgcgtcaaaatcaaagcagtccgcccagccgtcaaagcgcatgccgcgcttatgggcctccagaataacggcgttcagtttgcggtcaccgcgcgcgaacacggcttcgagaaaactagtctccgcgccgtggtagttgactgtaagcttacgggagaatgtggactcgcgcaggagcttctgctttctctcgagcatttcgatggtatcctgcccgaaccactggaacggcgtgaacggcttcggcacgaatgccgcgacgctgaccgtaacggcgacctttctgcccttctgacggttttccgtttcgtagtaccaatcgataaccttctgaccgaggcccggaatgcccacaacgtcttcatcggtctcggtcggcaggccgatcatgaaatagagcttcaccttcgaccaaccgttgttgaacgcgatctgcacggtgcgtttgagttcttcttccgtgacgtttttgttgatgacgtcacgcatgcgctgcgtaccggcttccggcgcgaacgtcagaccgcttttgcgcacggacgcaattttatcgatgagctccgtggagaagttatcgacgcgcagggacggcagagaaacgttgacgcgctcgtcctccgaccacgtgtgcagcgtgtcgagcagctcgaaaagtcggctgtaatcgctggtgctgagcgaggaaagggagatttcatcgtagccggtcgtttcgcacaaccgctttgcctgccggttgatggtttccacgctcttttcgcggaacgggcgatagaggaagcctgcctgacagaagcggcagccgcgaatgcacccgcgcagcacttcaacgacggcgcggtcgtgcacgatgtcgagaaacggcacaacgaaattttccgggaaatacatgttgtccacatcgttgcaaacgcgcttgcggatagtcttcggcacgccggcgtgcgggatataggctttcacggtgccgtcttcgttgtattccacatcgtaaagcgacggcacgtacacgccttcaatctgcgccgcttccattaagaattcttgcttcgttttgccctcttttcggcacttgcggaacagctcgatgacttccaaatccacctcttcgccatcaccgaggaacagaatgtcaaagaaatccgcgatgggctccgggttgcaggcgcacggaccgccgccgaccacgatgtttttgagttccgtgcggtcgcggctcaaaagcggcacgccggaaagctttaacatattgaggatgtttgtgaagctcagctcatattgcagcgtaaagccgatgaaatcgaactcgctgacggggtcgccgctctctaagccgtagagcggaatgtcgttttcgatcatcgcctgctccatgtcgatccacggcgcaaacacgcgctcgcaccaaatgtaatcgacgttattgaagatcgaatacagaatcttgatgccgaggtgtgacatgccgatctcatacgtatcgggaaagcagaacgcaaagcgtacgtccacgtcctctttatttttaatgaccgaattcagctcgccgccgacgtaacgtcccggcttctgcaccttcggcaggatcttgtctagttttttattcagcataaaattacctttcgttttgacctttgcataacttatctattttattataaccgaacagcgggggaatttcaacacatgttcccccgctgtttcagaattaagtaaaataagatgtaaaccgccaaaaacaaaagcgtaaagttgtagcccgtagaaatcaaaaccgaaaacccgagcgtgccgagggtgaacgccagaaggacggacgacacggttattgtgcgctcggccgttttttcactaaatgtgccgcacagcagacagtaaagcgcggtgccgccgtccaacggtacggcgggcagcacgtggaacgcgaacagcgtgagctgcacggcaggataggcgcgcggcagcggcaaaagcagcaggaagctaagtagatttgcaaacggccccgcaagcgacacgacagcgcgacgaaaatcgccgacgcttgccgtctcccccgccatgtgaatgccgagcgcgccgaacgtgaccgatttgatctgcatgccgcacagctttgctgccagaatgtgccctgtctcatgcacagccaccgccaaaagcgcgggcagcacatgcacaccgccgtctaatgtgagcagcatggccagccccgcaaaaaagccgaagcgcagcgtgagctccgtattatgaatacggaacgtcatcctgcaaaatcaaaacagattggttcaactccgcgtcgtatatggcacgcagctcgccgtatagctccggcagaaagccgcgcagaaaaaacgccgcaagcaaaatgagtacgcatacaagcgtttggaacacggtaaggcgaaagccgccgcttatggctttctttgcggcggctctgtccttcggcacttgcgcttctgtttcggcaggtatcggctcggacggcttttcctcgtcgtttggtgtgggcgtttcgtaaaactgcatggtttcctccgctacaaaatgatgcagataagcccattgcagccatcgttgatgatgcgctcaatggtctctcgcaccttgccgcgcgcatcctccggcattcgggcgagcttattgtgcatgccctcgttcacaagctcatgcagcgatttgccgaaaatgttggagccccagatttgcgacggattttcctcaaattctttcagcaagtacagcacaagatcttcggactgctgctccgagccgacgatgggcgtaacctccgtgcggatgcatgtgcgcatcatatggatggacggtgcggccgctttcaggcgaatgccgaacttaccgttctgtttgatgatttccggctcctcgagcgtcagctcctccatatccggcatgacgatgccgtaacccgtctgcatcacgtcgtcataggcgctttgcagctttgcgaatttctttttgatctcgttcatctcgatgagctttgtgagcagggcggtttcgtctgcgacctccatgccggtcttttcgccgagaattttgaaaaacagcgacggcatgggggtaagctccagcacgcacgcgccgctgccgagatccatgcgcgcgcagcggacggttttgaggtcctcgcatgcggcgagactacccgagacctgctgcacctcgcagaccctatggatatcgcatgcgcctttcagggtatcgaaaatctcttttttgagccagtggtcatcgtcaagatcgatgatccagccgggaatgtcgagtcgaatttcccgcacggggaactgatataaaagcttccccaaaatgccctgaatgtcctgctccgtgatgtccatgcagttcacgggcagaaccggcacgttataatgctcggaaagctcgtttgcaagcgcacgggcttcgttcgtattcgggtaaacgcagtttaaaagcacaatgtacgggcggtttgtggactttaattctgcaatgacacgcgcttccgcttcctcgtattcctcgcgcggtatgtcgctgatgcttccgtccgtcgtgatgacgagcccgatggtcgaatgctccgtgatcaccttctgcgtaccgatctccgccgccatgttgaacgggatgggatcctcaaaccacggtgtgcgcaccatgcgcggctgctcctcttctatgtatccgagggcgctcggcacgatgaagcccacgcagtcgatgagccgcaccttaaactccgccgtatcatccatttttacggtgacggcctgttcggggataaacttcggctcggtcgtcatgatggttcggcccgaggcggactgcggcagctcgtcgacggcacggtcgcgcgcggcctcatcttcgatgttcgggatgaccgtcgtatccataaatttcttgatgaaggtcgatttgcccgtgcgcactgggccgacgacgccgatgtaaatctcgccgttcgtgcgcgactgcatatctttatatacgctgaatgcttccatagccatatcctttccgctgtcttattttcggcagataatcacggggcggtcttcgctcaaaacgtcttccatacagtcgttatgcgtgcggatggcgctgacgcgggcgtggtagcgttttgcgatgtcccagaccttttcgccgcttgaagcgtaatacaccgccgcgcagcagggctccggctcggtggtctcatcgagctccgcgctttcgagtgaccgcgcggcgtataccacgcgcacctgttcttccatgcgcagctctgcggtgcactccaccgtgctgctgtccgtaatgacatactgcacagatgtaatctcgccgcgcacactgcggcgtccgacgatttcagcggtatggacatcggtgaaatcgagcatgcgctccgtgtaggcaatctgcttctctttcgtgcggtataaaaggcacacggtgaatttgccgcgcacggcggcgttttctttttcggtaaacgccgtcagcgtgaggccctcacaccaaatgtcgagcacctgctcgaggtcgttttcgggaacgagtacgttctccttcacgcgcacgctgcgcggcggcagcacctcacagcgctccagtgagaggttcttgtatttcgccgcccacgcgccctttatggaatacgcgtcgcacacagtgcgcacggtacacgactttgtaaactgcacgcagaatgtgggctttaggtaaagattcagcacggtatattcgcccacgctgtcttcacgcggctgtacggtgcattcgccgccaagcacggagatttgtacggtacagtcctcccccgcgccggcgcactccactgtctgcgtaaacggcaatatgcacgaaaagcgctccggcatggcggtatcggaaaacgtgcggtataagatttccacacacgcctttcccgtgacgaccgcgccgcccgcctgtggctgcaccgtatcgatctgataccgcacactgtagcgcaaaacggtctcaataggcgacttgccgtttggcagctctgcgttctgctccaaaataaacgcgtgcatcacgcagcccacggcgcgagtaacatcgtattcttcgcactttgtttccacacggtcatccgaaatgcagtctgcaatttcaagctgccgcacggcgtaagcgcgcacggaaagtcccaaagtaatgtgcagatcgaccctgcgggcgttcatggcgcggcaggtcatgtgctgcacgaacggctccgcttccgccgtcacgttttccgcctgtgcacgcagccgcaccgaacaggtgaactcttttttcgtatcgaatccgcgcacgcagccgccttttgcatcaagatataaaacatgcatggaagcgcagccgtcgatcgtaaggctgtcccctgccgccgaaacggacgtgacctccggtgtgacgatacactttaaaatcttctggatatccgcacagtaatccggcagggtgtattccgtatctacgggacactcctgcacgccgtcaaaaatctgttcaaagccatcatagcgctctgtgtttgtttccatccgcataagctctgtaaccttcctttcgctgccctttgtttcgctacattgtatgagcgaaaagcggacaatatgaccgcccctttaaacggaaagttcacagtctgttccttgaaattaaggacctttcgtggtatatttatgtaggttaacgaac

SEQ ID NO: 1691 - DNA, 428 bp, Unknown
  gut microbiota DNA sequence
atactgtctaacaaatggggtgcagttcatttggaactaccggtattcagctttttttcaaaacttattatgccgttgttttacgataaaaagtttttgcgtggccgctggtttgaggaatccagtctcggctggacatggtgctggcgaaacttgtggatgcagaaggtaaagggcatcaatcgcgatattccgttcccggtttctttccgcaatgaagtaagcagtgcggaaaatctgattttcgacccggacgatatgaacgattttaacgcgttcggctgctattttcagaatttcgccgccaaaatcgtcattggcaaaggcagttatatcgcgccgaatgtcggtctcgtcacggcaaaccatgtgctgaccgatttggagcagcatcagcccggcaaagccccggggcctcaaattgctct

SEQ ID NO: 1692 - DNA, 3917 bp, Unknown
  gut microbiota DNA sequence
cgtataaaattcacacgcatgatttttacgagctgtttctcgtctcgcacggcggggccatccacgccgtaaatggacgctcgcagctgctttctgagggctcgttcgttttgatgcgcccgagggacgtgcaccgctatgattttttcaacaacgcggatttcgagctgcttgatatcggtatcccgtgcacggtgtttgagcgcttgtgcgattatttgcagcttgaccgcgccatattcgatacgccggagctgccgttacattgtgtgctttccggccacaccttaacggatgtgcgggaaaagcttttgaacacgaaccgctttgccgataacgaaacggcgtgccgctacattttaagcctgtttccgtatttggtgcagctgtttcttacagcacccgcgccggaagcgattttgcctgcgtggttttcggagctgcttgaaaaaatggagcggtgcgaaaattacaccacaggtcttccgtgtcttttagcgcttgcaaatatgtcgcaggagcaccttacgcggtcgtttcgccgctacatcggcatgacgccgacggagtacatcaacggcaagcgattgtctttggcggcgcagctgcttttgcagggggacatgcccgtcattgaaatctgcggtgcatgcggctttaacagcttaagccggttttaccgcttatttacggagcgctacggctgtgcaccgaaagcgttccgcacgcagtttgcgcatgcgcagtccgggcaaggttcgcttatatctttatcataatcgttttgccgtttgatttcctcaaacgcattgactaaaacttccactatattgatattcaaaaaataccgcacaaagtgcaaaacgcagctttgtgcggtatggcagaaaataaaaaatgcagctctctcgaatagagaaggctgcattttgtgcgttaacccaccggctgttcctcatccgtaaactggctgcggtacagctcggcgtagaagccgtttttcgcaagcagagattcgtggtcgccctgctctacgatgttgccgtcgcgcatgacgaggataacatcagattccttgatggtcgataagcggtgtgcgacgacgaacgaggtgcgtccgcgcatcagcttggcaaacgcgcgctgaatgcgcagctcggtacgtgtatcgatggaagatgtcgcttcgtccagaatcagcataggaggcagcgtcagcataatgcgcgagatgcacaaaagctgtttctgtccggcggaaaggctgccgccgtcttcgccaatctgcgtatagtagccgttcggcagctgctcaataaaactatgtgcgtgcgcagcctttgcggcggcgataacgtcttcttcggaagcgtccgggcggcccatgcggatgttatcgagcacagtgccggttttcagccatgtttcctgcaggaccatgccgaagttacggcgcagtgcacggcgcgggatagtctgcgtattcgtgccgtctacgctgatgctgccgctgtctgggtcgtagaagcgcatgagaagattgatcatcgtcgttttgccgcagcccgtcgggcctacaatggcgacgcggcagcctgccggtacatccaagctgaaattgcggatgagcgggcggtcttttgtataggagaagcaaacgttatcaaacgtgacctgtccttttgcggtctcgctgtgctccggcagcagttcggggtcggcagacatttcttcgctgtcgaggaattcaagcaggcggtctgcgcaggcgagtgcgttctgaagctcggtgataacgccggaaatttcgttaaacggcttcgtgtactggtttgcgtagctcaaaaagcaggagagcataccaatggtgaagccctgtccggtcacggccagaaaagcgccgatgagcgcaaccgccgcgtacacaacggagtttacaaagcgcgtggcggggtttgtgatggaggagaagaatgtcgcttttaatgtgtggcggcgcagctcttcattgatggtgtcgaatttctccatgttctcgtcttcgtgtccgtatgcgcgcacgaccttttggttcgtgatcatctcattgatgaatgccgtctggcggccgcgtgtttcggactgtaagcggaacatggcgaacgttttctttgcgatgaagcgcgccaccaaaatggaaagcggcgtgacaagcaccacgacaagcgttgtccaaacgttgacggaaagcatgaagccgatggtgccgatgatcgtcacaacgccggtaaacagctgtgagaagcccatcaaaaggccgtctgcaaactggtcaacatcggcaatgatgcgggaaacgatgtcgccggtttcgtgtgcgtcgaggtaagaaaacggcagacggtgaatttttttaaaggctgcctcgcgcatatcgcggatggtattgtacgtgaccttgttgccgcagacattcatcagccactgggcgagcgccgcgcagccgatgagcaccgcgcaggtgaagagcttcggcaggataacggcaaagttgacctgttccttgccgatgatggcatcgatggcgtcgccgacgagcaccgggatgtacagcgagcacagcacgctgactacggcaagtgcaagcagcaaaatgatggtcggcagatacggacggatttgcaaaagaacacgtttaatggtgctgtttttgttatttatcttgctcatttcgcagctgcctcctttccgccaaactgagagtcatagatctcgcggtacacggagcagttctcaaggagcgcatcgtgtgtgccgcagccgacaagcgcgccgttgtctaagacgagaatcttatctgcatgccgcagcgaagatgtgcgctgcgagacgatgaacaccgtcggcttattcggcagtgcggaaagcgcgccgcgcagtgccttttcggtcacatagtcgagcgcggaagcggagtcgtccagaatgaggatctcggggttacccacaagtgcgcgggcaatggaaaggcgctggcgctgtccgcccgaaaggttgcggccttcggcggtaatcttcatatcgagcccgcccttactctgtacgaagtctgcggcctgcgcagcctttacggctgcctgcatctcttcgtcattggcatttttattgccccaaagcaaattttcgcgcagcgtgccgcgaaacaagaccgcgcgctgcaatacgacgtgcaccttttcgcgcagttcttcaagcgaataggaattcacgttgcggccgtccacgcggatggtgccggaggacgcatcgtagaagcggggaataagtcccacaagcgtcgttttgccgctgcccgtgccgccgataacgccgatgatctcgcccggctcggcggtgaagctgatgttttcgagcgcgtccttcgcgccttcgttatagtgcatggaaacgcggtcgaactcgacggcgtgggtattgtagattttcttgtcgtcggaataaacggtgtttgtgtcgagctcgagcacgtcgcggatacgtgcggcgcttgcaaaggactttgttacggtgatgataaggtttgccagcttgatgagctcaactaaaatctggctcatgtagttatacagcgccacgacctgaccctgcgtcaaaatgccggtgttgacctgaacagcgccgtaatggatgagcagaatgatgccgacgttaatcaggataaacgtaaccgggttcaaaagtgcggagatacggcccgtggatttctggagcttggagagcagcgaattttggccgataaatttttctgtttcggtgtcttcaccgcagaacgcgcgtatgacacgtgcgccgttcagattttcacgcgtggtgttcaaaacggaatccagctggttttgaatagccttgtagcgcttgatggtcagcagcatgatgcc

SEQ ID NO: 1693 - DNA, 157271 bp, Unknown
  gut microbiota DNA sequence
atattattttattgtttattattaattactgcaggcctgccttcttttcccgcagacaattccacaccagaaggaacatcccgatgaacagcgtggccacgcccatgccgcagaacattccttcatagccgaaggattccacgaaaaaactgcccccgataggcgccagagcgtttcctagattctggccgatcacaatggtggacaccgccacccccgcctttgaggcgtccagcgtgcgaacggtatgggcctgcaggcaaggagttccagccccctgtcccagggcccggcagacagctgccagcatcatcatggctaaagagtaagcaacgcccaccaggaaggtgcccagggcggcgaataccaccgcagggatcatcacgaagtacaaacctttcttatcctgcaaccgcccggtgatgggctttacaatcaccagcgccacagcgtaggccgtgaagaacagggagatgttagggataccccgctcggtggccaagatgtccaggtaagtggtggccagaccgttggcggaactgaacagggtggccagcaacatcaggcttagaaactctacagcaaccaggtcgttgagcttcagggagtgcttcttttccccctcctgaggtgccttggcgtcatagggtaggatagtgacgcacacaaatgacaggatcgtggaaatgcaggctgccacaaaggccgccccgaaccccacagcgtcccgcagagccaggcctagggccgggcccaccgcctgtgccaggggcatcactaggccaaagtagcccaagccctcccccatacggtcccgggggataaactcgctggcgtaggcggtggtcaacacggaattgatagtgaagaacacaccggtgcccgcccgcaggaacaccaaaaatggaatggtggtggcgaaggcatggcctagcaaaaacagggcgtagagcaactcggtgcacattagcagccgcttgcggttcatccggtcggacaacacccccgccactggggacatgaacatcccgatcagggacataattcccgcaatagatgaggccaccgtcaattccgcacccaggtccagggcgaagctggctaccaaagggaaagtcatctgtcccgccgctccgtttgtcaggttgatcaaaatgaggacgataaacttccacgtccacaatgtatttttttgacttaatggttttttcacttcccgcctcaccttcgactaagtctttcttctataacaacagatatttcgtcggtctttactttttcaccccaaagacaacatactttttctgagccggaacagctattttgggacgggtcggaataggcttctatttgagaatccgccttcagggcgatgaccgtgttgaaacgcgcaatagatacggtttttccgtcacttcgggctagatggaatttccagcgaaattgggggccctaattttaggtaaccgctttccgtcctcggtctacatattatagcccgctccgagtagttcgatgtcaggatgcttggctgtcaagcgcacgtatcccggttgatcacgcagcaatccagattgcccatctcaatgaactcatccattatcttgatggtctcattattgcttgggcaggggtaaagcaataaatgcagctttctttatctaattcttatttaagctgcctttcctgtttaatttgtattgttacggcgccaaccaggcttttaaaaaacgaacagtcacatcaagaacttgatctgtccacaaaaatgcaccgtgaccagctcctgtcaccttgcaaaaatgaaccgcatgtccggtcttttgcagtttttggacagtgaggacactttgattaaatggaacgacagggtcttcatcgccgtgaaccaccaagaaaggcggtaacggagttccctccttgatgtaattaagtgggttaccgggctctgccaactcagggtgctccgctacacagccaccaaataaaatatcctcaggaatccgggatttatctgccaccacaaaggggtcacggggtttgttgttcacctgactaatatcgctgggaccgtaaaaatccaccactacttgaacagcatcggaatactcccgatattcctctgtcttgaatagttccatatcaccagtaacacccaccatttgagccgcatgtccccccgaagaatctccccagatggctacttgctccgggtcaatatgatattcttttgcatgggtacgcaaaaaacgaatagctgctttaatatcctgcaagaacgcaggaaatttcgctacagtggcagctcggtgcttcacactagctactacaaatccttcacgggccacctgcaccaactgaggtatgttacggtacttctcctgctcaccccaagcggcaccttgcacaaataccaccaggggaaatgtccggtcagaaggcgttccaggagcaagaccgcagggcagcaataactgcaatagaaggctctcttcctctcgctggacatatggaatatccgggaaatagttgacaatcccggtctgggatttatctgcaggcaaaatctgcattccaggcagcacagtggtatcgcttggtacaatactctttctccacgccataaatgattcctccattttttcataataatttcaaaattaaaacaaatagaactattaaatggtatcgtgtctatctagccgttctaaccttctcaacacggagagcaaatgttccacggcgatttctaatttctggcgggtaagacggctctcttccctccccttcagaatctgctgaatcacagggggcccaccaggcataatgatatcgttgccggcagctacggcttctgcgccatctaccacaatgtccatatcgccccagtcggtgaccacaaccccgtcaaagccccactcttcccgaagaatgtgagtacacaaatccttgctgcccccagcaaaggttccattaactttgttgaaggaggtcatcacacagtgaagcccggtctccaccgccatctggaatggcttgaggtacagttcccgtagggcgcgctccgagacaagggagtccactgcgtcgaaagcaggaatgccgttttccagtttagcactgccccgccggtaggtttcttgctcgttggctgcaaaatgcttagcacacaccagcactttgtggttttcctgaaccccacggagcactgccgcacccatcgcccccgtcaggaatggatcttcggagtaatactcaaagttacgtccccctaaggggtggcggtgaaggtttaaggcaggagcaagccacacatccacctgctgggcctcgcactcagcacccaccgcgttccccatttggtacagggcatccacgtcaaaggagcaggcaagcagcatctccccgggccagctgaccccgccgacccctgcggggccgtccttgtaaaacatcgagtgaataccccgctccggcacagctggggacacatatccattgtatcccgccgggtggtcgttaacggtgagaggcctgccatcctcttgaagggtggagggcagctctgtctcctgaaagtccgggaagggcagacctgagccgtagcccacgcacaggcaggccagctgattttccgtcagggccgagcagtccaccgccggagccgcagggatattcaccgttggcacatcctctgggaagagacccagcactggacacccctgggggacctttgccagaacaggctcccggacgagaaggtgcagcttctctcgaaaaacaggatccaggaccagccgattttccacctgttggaccagaatatccttttccactcggaccaccgccactgtttgggtgtgggcggaggaattccccagcttcactaggtatgtccccgcctctatgacccaagcggcccgatcctcccggaaagaggccagctctttccagggaatggtcatggcaatgatttcggtctgccctggagccagctcccccgttttggcaaaggctttcagctcttggaacgggtgtggctgggcagtcacctgagcagacacatacacctgtgacacctcccgaccagagcggaatccggtgttttttatcttggatttcacagtcaccccctgggcagtctttgccaccccggcgcaggtcagagagaagctggtgtaggaaagcccaaatccgaaagggtacaggggttcaatcccgaaggagtcgaagtaccggtagcctaggtagatatcctcccggtaggcggtaacgggccggtgagcgaaggcacggtccacgaggggtggggtcaggccgtagtcctcatatgtcttgatctgcttcggatggtccttttcccaggaaaaatcctcccaggcgggatagtcattcctccgcttggcaatggtgacactcagctttccggatgggttggccttgccgactaacagctcagccaaggcagcagggccctcttccccaggaacgcccaaaaatagcaaggcctgaatttgcgaatgctcttctacccaggaaaggtccatcagaccatttccattcaacaccaccgctaccttaggaaaatgggcgcaaatggcctccaacaggactttttcctgattggaaaggtagtagtcattttccaagcgacgatcgcactcctccccaccggacttgcgacccacaatccacagggcggtatccgtccacctggaagcctcatcaagaagttcttgcggaggggaaaattccgggggattggggatgtacttgccaaaaatctcgtacatcagaccgctattgacagcatcctttatttttgtaaagtcgaactccgagggattgtctttatgataggccttgatctcatcctggtaccaggcagagagagactcctccggccgtacgccaacagccttcagcgcatctactacactgggagacacacctccccgggcagctccggacccgttgccggagagcaccgcatcccactgggcccatccgaacagggcgaccttcgctccctggggcagtggcagtacccccccttcatttttcagcagcaccaccgagctcttaacagcctggcgggcagtttcgcgggcgttcaaggttgcacctccccagatatactttgtagataatggcgctttataatgttccccagtacgttttttgcaccccgctgaagctccgccagggtcagacctcccttgtggtaggactctaaaacggagggatccgggctgccctcccggtccacagcgccgggcatcaacacgtccacctgggaccggacacggtaggcgctgtcccacacattctcaaagtccgggtcggcgctgggacgctcccaccagtcggtcatcaccgagccgccgtagccccactcgccccggagtatggtggtgcacaggtcgtagttgtagtggctccacaccccgttgatcttgttgtagctggtcatgatgtgatggggtgcggcctccttgacgcagatctcaaagcccttcagatagatctcccgcagagcccgctgggacacctgggagtcgttgtactcccggttggtctcctggttgttgcaggcaaagtgcttggggcaggcggagacgccgttcttctggatgccccgaaccaccgcgccggcagttttgcccgccagcaggggatcctcggcgaagtactcgaaattccggccgcacaggggattgcggtggatgttcatcccgggccccagcagcacatcgctgcctttctggaccatctcacggccgtgggcctggtagaggctctccaccagggcgggatcccaggtgcaggccaggcaggtgccgcagggcagcagggagcagtagtactgcagccggatgccggaaggaccgtcggtggtggtgatggggggcacgcccttctcccgcaggctctcgatgatgccgcccatgacagcggcgttgcccttagcgcccagagggctgtccatgacaaagtccccgtgggtcagggattccagctcctccggggtcagctgagccacaaagtcctccatggaggccagtcccgcctccacgtccttgagcttgatgcccttatccccggtgaaggggatctcggtgggcaggttgtccaggatccgctccttcagagagtgctcagccagaggcacgggctgataggctttctggccgtccttgttcaccaaccggtcaaactgggtgaccggggcacaggcctcctggagctgggcggtcactcgaagctcaccctgggagaaggtccccgcctgctgggcagagcgcacgtcggtgcccacatagatgccgtagtcaccggcctccagcacccaggcgttcttgtggccggtggcaccggagtcgtcgaagctggccatggcggtcaccgggaaggtgagggtcagggcttgggactggccgggctggagcagcttggtcttctggaaggcgcacagcacccggctggccttgcccagctggccttgaggagcagcggcatagacctgcaccacctctttaccggggcaggagccggtgttcttcaccgtcgccttcacccggaccgtgtcccccagagccttcacctggacgttctccagggcgaaggtggtgtaggacaggccgaagccaaaggggaactggaccgcgtccttggcgaaggtctcaaagtagcggtaacccacatagatatcctcggtgtactggttgtattcctcccccaggaagttctggctgggggagtcctggtatcggagggtcaccgtgtcgctgagcttgccgcagggagtgaccttcccggtgagcaggtccgccacagcgttgccgctctccatgccgccctgccacacaaacagcgccccgtcaatggggtaatcgcccagccagctgagatccaggatgctgccggcgtcgatgatcacggcggtcttctggaaggcggagctcacctgggagagcagcttcttctcgtcctcggtcaggtagtagctgccgggttccaggttgttttcccgggcctcaccggctgcccggccgatgaccaccagagccgtgccgcaccgggaggcggcggccttcacctggtcgtcggtgaggggcatctcgtcgaagtaccggggccagtggccccagaagcccatgaagggctcgttctcggcgcaccactgggcgtaggtctgggccagctcctggtccacggccacaccggcgttctccaagccctccatcaggttgaccttgtagggcgggttcacgtcgccgccggagccgtaccccacgtagaaccagtccagctgcacccggccgaacaccgccaccggttcctcggacttcagggggagaacggcgttgtcgtttttcagcaggacggcgccctctgccgccgcctgacggctcagagcgggcagatggggctcgatgtccttttcgccgaagacgggcctacctgtatcttgtgccaagatatctagaaagtctggagacaacgtagcccgaatttcttctggaatcctacttatatccataaaaaaatcctccacattcatgtattaatgattttgttgttttaaaacttttttcacaaagtcattagcgctgaaaaactgggcaatttccattcccccaccccagtcttggcagcatcccctagggctgcggctttcattccggcccggtgggcggcctccacaccggacacggcgtcctccacaactaggcaggtttccggagacagccccagatactctgccgctttcaaaaacacctctgggtcgggcttggaacgtgtaatgttgtttccatccgacacagcgtcaaaatagccgcccaggccaagccggtccaagatgagaggcgtgtttttgctggaagaaccgatggcaagctttaaaccctgttttcgcagggtttccagagtttcaaacacctccgggctcaggtccgccggggtcatctccctgagcaattcctgatagcgggtgtttttagccgcagccattttctctttttcttcctgggagtaggagcgttttgcccgctccagaaggatctccaaactctccatcctggaaacaccccgcaaacggttgttgacactgcggtcaaaggggatgccctcccggtctgccaattccttccaggcctggtagtggtactcatccgtggaacaaatcactccatccaaatcgaaaatgataccttgaaatatcatgcagtcctccttataaaaaccgagcttcccacacgccgcaccagggatctatagggctttttccaacaaaaatatcacgaccgatcaatttcttcacacatgcctcaacagtagcctggttatcacaatagcaattgacaaaagtggagataaagggtacatcaatcatatgataggggttgcaaaaggatacgaacaaagtgggaatgtcccgagtgtaccagggttcgtcagcagccatcagcgtgacccaatccaggcggcgggtggtattattggaaccggtggccacattggccgccacaatggacaaatcaaatttccccttcaaatctcctactcccgcagtgaagatttctccttgctccagagtggcgtaatcgaacagagatacaagaaatcccgccctctctaaggcagcttttagcggctgcgctacactggaactctccccaaaggagcctgtttttccttcacctaatacggtcaaacggatgcgtggcgtttttttcggggaaattggcagaaggttctgattatctttcaccaaagtgacagccttctccgcgcattcttttgcccaagcttggtgcttttcacaacctagaactgacatattccctgggaacagagtacccaattttcgtttttccggcagacccagatgagccttagtagccaaaattctagtgacagcctcctctacccgtttccaagacaatcggccatcctgcaatgcttcccgaatagatccaatatcctcttccatgttcttacagaaaaggagcatatccactccagcattcagcgcggccaccaaggcgttggcacgggacagagccatgctaaaacccaccattggagtagcatcagtaacaactaaaccttgaaaacccagctgcccccgtagcactccagcaactagctccttgctggtggaacctggaagcatatctttctcctgcaaagagggattaatctttctcgtcatggcaggctggtagatgtgccccaccattacggtttcagctccctcatcgatcagagccttatacacgcgaccgtatgtttcctcccattggggggcgggcaggtcattcacagtagctagcaggtgctgatctcgttcatcccgaccatctccaggaaagtgcttgatgcacacagccatctgggcaccactgtcccggattccctggcagtaggcacgggccattgcgagtactgtgtctgggtcagatccgaaagttcgcacgttggtgatggggtttctccagttgtagtcaatgtcgatgataggcgcaaaagaccagttacaacccaaagcgcctgcctcacacccacagatttttcctagacggtgggcttgttctggatcctcagtagcagcgatttccatctctttagcaaaataggttccctcggtggcaatcccgtttccaccggcttccaaattggcaggaagcaacaatggaattttactggccttatccatggcctggtaggccgctaatacttgagcggccggagccgagcggaacataaaccctccaggctgataccgttggaccagctctcccagggtctggggattctctccaccggcagtgatgcaaaacaattgtccgattttctcctcaggtgtcatagaggagagggcaccttggacccaggtgatggattcttcacttaagaagaaaggactggagcgtaagtcgatcataatggcagtttcctccttcaatcttccattatatatttcagcacaaaagcctgaagtggattttcctccacctgctcacagtgtggcttttcttgaaacagcatgttttcccggtccgtctcagtgtatggtttccaggttggcaacttttctccatttggatttttacgtttagcgaaatttgcccaataagcagtcatagcccgcgacagttcaaagtcggttccggtcatgggacgccagcaacgttcaaaagtgccgaacacataccataactctgacgagtgaaaagagccatcgttattgccgggcaaatcatggtcaaagacatacaaataggcaggagcatgaccagctcgaagaacaagctcacacaaggcacggtttcccaccatccctgtgtgcgtatcttttatcacgcgggggatgtcttccggttcctttacctgagctaactccatataggcctgagctttgttgccaaacaggcattcttgcaacctttcccattccttcaccggcatactaccgctcccaaacatgttggcttctccagaggtgttccctaccatgataggaatatctggaaattccccacaaaaataggcttgggaaggggtgtgctgcagaaaatagccatctataatggtgccaaagtagtacttgggtggaatttgaggaccgatagcctcatccaacaccttccatgggagttcacgtagttcttccactgtggaacaccccaaactttcagcatactccactcctaagcgttccgctttctcaaggggtgtgggcgccataactttgctgattttctcaatggaagcggagctttgaatgatcacaccagcgatatctccacgggtaagaggagacaccagcaggtcttgaacactagctgccccagcagactgcccaaaaatggtaatgttattcggatcacccccaaaattcttgatattgcgcctgatccatttcaacgccgcaacctgatctaaatgtccgtagtttccagaaacatgatgtggactttctcgagaaaggtctggatgattaaaaaatcccaaaattccaagccggtagttaatagtcaccaagataaccccttcccgacagaaggcctcgccatcaaattccggctcataaccataacctcccatcagggctcctccatggatccataataacacaggcattttttcatcatgggtaatggacggcgtccatatgttgagatagagacagtcctcatccatgggttcggtgctgcgataaaactcgtccccgtacagagtacccataaaatttcgatgctgaggagcaatcggtccaaagcgcgcagcatcccgcacacctttccaagggataacgggttgaggctctttccaccgcagatttcccactggaggagccgcataagggacacctttaaaaaccgtgtattggggtattcccgccggcactccccgtaaggccccactttccgtttgaaccacccgattaatctgaggataaacttgctgggacatattgtgttccttcctttcttccagataattatattgaaagaaaaaagctgtaaagaaatgagaaccaaccactgctgatccggcatttttacagctttttccctctataatattgacacccacatggctaacactgtgccttaatgcaaaatcaagatttcatcttctccatgaattttccgaaggtcaggagccaccggcaggaaagcctcgtaaaaatcatcatcaaagtgatggcacatccggcacttggcgtccagaaccatcgttgcggcatcatcagcggtgcaaggctcccactggggaagattcgctgccgtaggcacaccggttgtggcaaagctgacgaatgctcccgacatatttgcctccaactgatcagaaacaccaggcttgttgcaaatcgccactttatctgtgttgtggaacgcaaatggaatatcagagcagtgccatgccggccggccatcgtcaatggggaactgataagaaaaaacatagttgtacgtaggtacctgagactgagacgccttcatttttacatagttcttggttgccactctggagaaggtatcagagagaaccagatccgtcacagggcggtccggatagcactgagcgaacagcttagctaacggctcggcgtgctctccaagatactggcgaagaaagtctaactgcttcttttcgctcatagtagtgcggtttttcaggctgggagccataccgccaaactccgccactactgtaccggcaatcaggggaatagtttgggcatgctcggtaaaacctatatcccagggatctccaaggtaatagctattgggaataggcccgcatccggtgtaaccgcccgcttctcggatagcgggaaccacctttttataggcttcggccagagtctcatagggcaatgtttccaactgttccacctgggcttcggtcaatcccaattcattgagcatggcttgaatcaatgggcggctatccgtgttcttactattcataaaaccacgaccatcagcgataccactcatgataatagccttgtggaacaggccgtccgctgcgggagtctgcataagggaagtaacctttccaccaccgccagactgaccaaagatggtcacattttccggatctccgccaaagcgggcaatattatcatgtacccactgtaaagaggccaccaggtcagcgttgcccacattgccagagttccaatacttttccccatagggcgacagatctaaataccccaagatattcaggcgatgattgacagttacaactaccacgtcgccaaatttagaaaggttttccccatcataggaaatctgctcaatagatgaaccagcggagaatccgccaccatggaaccacaccatcacaggacgcttggcagtttcatccagggactgggtccaaacattcaggtactggcaattctcatctttgggccagtagcggtgaggaacacaaatctccccccaggcagtttcccggtcaagcatagggcacacgaagccgtaggaatgggcgtcatacacccccctatccttccaggaagggaaaggttcaggcatctggaaccgcttggctttagcgtagggaataccgtggaaagtgtaagtgccatccacctgaaagccccgcactttaccagaaacagtttccacaatgggtgcatctaaagaacaaagaaattgtttagccatcgttttactccttttgtatatttattttttattttgcagtaatcaccgggcaagatagcgatcgtaagccgcttggtaaatctccacgattcgatccataccataggaggacaaagtctcccggaagtcatcaaaagaggtgctatcgttaccattgatgtagtttaccatgtactcctcaatcaaagtgttgacagctgtctgcagggaagtcagctccacaccttccgcatcggtgaaagccagagagctagtcagccagagatttgtttccggagcagagaaaatagcggtggaatccagctggatgttgtcttccgagttattgataatgttggccatcttccaaccctgctcaacatcgtgcttaccaaaccagctgccagagttaaacgtgtattgatacaacacatcggaaggagccagaccatcgggattgttggtgaccaactcggtgaactcaggagtaccttcctcgtcaagctcataggtttcgccctcgatgccataccagctcaagtaggtaccctcatcagaccaccaatagtccaaccactgagcagcgagctcaggcttctcacaagcagtggtgatgtagatgggatctttagcaatgatacgttgggagcactgcacaggctcatctccgggttccagcaccggattggtaatggcctgaaaatacaaatcaggattggtggtctgtcccatagtataggtagtgttgccacaagcgaaagcgtaccagccatcatacagaagagtactatcgttttcaacgccactaaagtcacgggtcaccatgggaccaccggaagtgaagttgggatcgattaggccctcggagaaccaactgcgcatctcctccagatattgaccaaacccatcttgaagagcggaagcgactacggtgtcaccgtccaactgaaggtaattatctgtagcaatggtggttaccccgtatgccaaagacaggttggatccgccattggttccaggagagaaaggagcgggcataccgttctctttagccttcagtaacacatcgtgccactcgctaaccgtttctggaagctccaagcccatagggtcaaacaagtcttttcggtaggctagtccattccaggtaccctctgcctcaatggtggtatccgtaccaaccattacataggcagccatcaatttgtcttcatcagaggtagcctggcggcgtgctacttcgttagaattaagaattgccatatagttgggcatatactcccgaatcagcggatccatatcggcgatgacaccgtcctcgacacctttagctagcccaccggggtaagtaaaagaggctgcgtacataatgtcaggcagatctccagaggaaaacaggataccttgtttctcagaggcctcactggttgttacagggatccaattgatgtggacattggtgcgccgctccaattcctgcacacctttcaaatcattggggtcaggcacggcattgttgttgtacacacaccacacagtcagttcctctgtttcatccgtaagaggcagttgtaaaccgcctacatcttgcttttccgcagtggtagaactcgtctgtgcctcagacgaattggaatcactcacggaagagctttcattgtcgccagaagagcaggcaaccgtactggccatcatgcaaagagccagcagcatagtaatgatttttttcacgggaattcctccttcctcagcaaagagctgagtttattgtacagcgttctgagtcgctgcaactgacttgttatgctttcaccgcgccaatggtcatgccggtgacaaaatacttctgtacaaagggataaatacacagaataggaagcgtggatacgacaatagcggcgtactctgtgttctgccggtaaatggagctgctatcctgcaaagctgcagttgacgaggtgatttcgctattctccatcaagatatcccgaagtaccatctgcagagggtacaaatccgtacgggtgggcagatacattaaggccgacatgaagtcgttccactttgcgaccgccgagaacagcataatcaccgcaaaggtggatttgcaaaggggtaggatgatgcgaaacataatggtaaaatcgttggcaccgtccaagcgagcagcttcctctagcgcgtccgaaataccctgcatagccgtgcgcatgataatgatattgaacacgctgagcataccgggcaccacaatggcccaacgggtatccaacaaacccaggctacgcaccatcatgtacatagggatcataccgccgttaaaaagcatagtcgagctgataatgagcataaaggtgttgcggaaccggaaacgattgcgagaaaatacataaccggccacaatagtagctacaccagtcaacacacactgtaaaaagatgtagataaaggtgttaagatatccgttccacaatctctggtatgtcaggataatgctataagcatgggtatccaagttttgcaagggatagagaatcagaccttgagtaataccaacctgggtagggttgcttagtgaacccatcagaacatgccatagaggcgccaagcacaccagggagatcaaaaccagtaaaaccacagcaaatgacataaacactgcacgtgacactgttattttgtaatgcatacgcgtctctccttcgttagaacatagatgtaccagccagcttcttcgcaatttggttggtagtaatcagcaagatggtaccgataatagaattaaatagccccactgcagtggacaagccgtagtcggactgcacaagccccatacggtaaacgtaggtgtttatcacatctgcgaagttgtagttggcaggcgaatacataagcaggatcttatcggctcccaccgaaaacactgagcccatctgcataatcaacatcataatgatcataggtaatattcctggaatggtgacatggatacattgaagccatttaccagctccatcaattgcagcagcctcatacagttcttggtcaatagcgctcagcgccgagatgtagattatcgaaccatatcccaacccctgccacatattttgcaagacatagattagccagaagttcgtaccctggttaagcagattttgtggttctgaaccggtgatagaagccacaaacgttgagattgctccgcctgcttcagtgaagtccactacaatgccacaagcaaccacggcagatacaaaataaggcatataagagatcgtctgcacaatctttttgaaatacttatttttgatttcgttaagaatcagggcaaagatgataggagcgggaaagttaaccaccaggttcagcacaccgatagccaaagtattgcgaatcaaccttcccacataaggccccgaaaaaaaagtttcaaaattttgtaggcctacccactggctgccgaaaaagcccttcaccggtgaataacgctcaaacgccattagcagcccaaccagtggcaaaaaactgaagatcacaaaaaaggctaaaataaaagttaaacagacatagagcactttgttgcacttgatgtctacccaaaggttgtgaggtagggcgcggacacctccaccctcgatgtagccgcttgagtccaaggtagttgtcgtgtaggacctcttcggctttattttcgccatccttcattcctcccatttgaaagatttgactatattataccgatttatcccatctatttctataaaaatcactggaagtttcatgacatttggcttctctccattaaagcaatataaaaaacctgttgaaaaacataaagaacctgtgaaccaattgccattttgataaatttcatatataattaataaaaacccaagtaattcaacttatattttggaaaggctataaaatgctcaagttacgttcctttgcttccatctgtttttttgccctggtaattccgttgctcggcgttattttgattctttttcaatacactgtccaccagacggtcacacgctatcaaatccaaacccacaatatggccactgccatcgtctcttcagtggaagatcagattgagcaagccaacacatacctccatgagggtagccagtctatggaatttctccatataagctacgctcaaagccgcgagaggttgtttcgatatgcctctcagctggatcaaaagctcgcaactaagttttccggcatacccatgttccggggctttttcttctacaactcccacacagattatctgtactcggattttaatggcgatgtctcatcatccttccaaaagcagattcggtgccttctgggccgctactccgcaaagatagaaaaagagatcaaactagttgtatgggaagatggatttggcttggcgcttatcttccggctgcaaaaaggggcaatagccgcagtactggaccctacaaaagaccccatgtaccaggcaaatctgaccaccatgcctgatgggctgtgcttctttccaaagggaaaggaagcagttcccaattctcaatccattaacttgggagactaccccatttctttatggattcaggtacctcaaagtggtttctttcatcagttggacaccattcaaaattttttgctcgttgtcatcattatcctcattctcttgttgcctgccatctggctgctattttacctcaagttttaccgccccttgcaaaacatcgttgcagcgttctccattgtttcccaaggcaacttagattatcgattgtctggtacaagcgccattcaagagctcaaccaatacagggctggcttcaataatatgatggacaccatccaagaggagcgcgcaaacagcctacattggcaacagaaaagctatcaccaacagttggataccatgcacgcccagttacagttctaccagttgcaaattcgccctcacttctacttaaattgtctgaaaaacctgtactccttactagatttaaaaaaatacgaacaggcagaggacctgattctctccctctccgcctatctgtcccacatctttcgaaacattcagtcatacatttccttgcgagaggaactggatgccacggaaaagtatgtgcggctttgccagcaccttgatcgccagcttcatctctctctcagtctggataacgacaccctcacttgccgtatcctgcctatgtcggtgctcactttcgtagagaacagcatcaaacatggggatcccgcacactgtttagaaatttcgatttctgtgaccaccgtcgagatgtctcaacagaagtttttgcaggtaaccattcaaaacaacggtggcccattcgatgaagcagtattaagagccttaaacacggctaatccctctgcagtagaataccgccaggaacatatcggtatctccaatgtgcgttaccgtttgtggttgatgtatggggagcgggccaaactttttttccgtaatcagggggaaaatgccgttgttgaaatactacttccctatgaaaaaagccaaggaggttcctatgaacattttgattgttgatgaccagccaaatgtgatttcttctctactgcaacgggtcccatggcagggaatcgggatctccaacgtatatacggcgaattccgctctggctgcccgagatgtgttattctctaaacaagtggatattttgctggcagatattgaaatgccacaggaaaacgggctttccctagttcgttggattcgcagcaagggtctggaaattgagtgtatcctgctgacctcacacgcgaatttttattacgcccaacttgccatttccctggagatttgcgactacgtcatccagccagccgccacagaggacattgtgcgctccattgaaaaagctaaggataaggtttttcaaaagcgacaggtcaatcaaaaaatccattttcaaggatttctctcctctacacaaaacagcatgttgtgccacttttttgagacccttccaatagaccccttacaagatcaacaggttcgcgatcaactgagagaactaggtgtagagaataattgggacggaaatcttttattagtccttacacgattagatcactggcaacgccttccccctcctttcccggatttctttcagtcctttcaacaagatctccaacgggtgctctcatttttaaacaaacctatgctctccttctatccagatgattcgtgcattttcaccgtactcttcgctcaactctccggcgataaagaaactcacttaagagccctacagcaacaggtccgccagaacagtggttgtctcatcagtcttttttactgctctatcactcttacacgcctgcggtcctccatgaagttgcttcatgagacaatggaaaaaacgggcaagcaggaaatgggtattcttaagcaagtgaccactgatctcgactatgcacagctctccccctcccgaagctatgaacgttacatcactcttctacgagagtatgtttcttcccgcctagatcaacctttgacccgggactctctggccaaagaattggggatttcttccgatcacttgagccatgtggtatttcaagctatggggtgttcgttgaagtcttttctcactcaagagcggatgcgtcatggtcgagaattgctgcgaaccaccaccttgtccattggggaaatcagtgcggcctgtgggtatgaaagcccagcctacttttctaaggtatatcgtgatacataccatcactccccccgcgatgagcgaagagcgatgtagggtacaggtattcattctttgtttattcagtgaatactctatactccacaggatagctatttctcctggactatgtcgcgggagtttccctcaatggtgtagactcgtcccttttccacccgctccacgatgcctacatgcgacaaggtagtgtcaagaatttttcgcactttagtttgcagactctgttgtaaatgaagtcagccagcaatggaggcgtccccaacggcagcctccatgtgcttcatgttcatgtactatctattgccccactgggtgccagccacatggcgtaacctggcacagactagcataagagcggaattgccgtccgggaagcttccaaccacatgggtgaggtgtcggatctcccggttcagcctctcaatgacattgttggtacggatgcaccactggtaatcttagccttttgctcatggacggggacggagaactgcggttgaccatcatggccacactagcccaataagaaagccgaaaaatctccgagcgtgtccgggcaggacaggctgtaagccgggaaaacggcgtgctgtacggcaacggaaatatcattggttacgaccgggtaggcggcacctatgtaatcaatcccgaacaggccgagactatccgcatggtgtttgaactgtattctcaggggttaggagaaaaagaggtggtcaatgaactgacccgccgaggtcgcaaagatggtcacggaaatgtcaagtagtcctgtgtcaagatcagccggattctccgaaacgccacctacatggggtacatcggctacaataagtctaaggtcaacaatttcttagagaagaaacgcatcaaaaatctggatgagagtacattcattctcagaaaaggagacttcgagcccattgtaaccgaagccctttggagacagtgtgaagaaatccgaaagaatcggattcgtacccttcagatgccttctggtgaggaacgcaggcagggtacaagaatcattcagcacctttgggtgcggaaacttcgctgtcgctgcggcgcaggctacaaccgattcaaatggagggttctacaggacggaactcctgtctatgggtaccagtgcaatttccgcacacagaatcctgccaagagttttgttgagaagaaccatcttgcagggcaaaaaagctgtgacgccatttccatctgcgaatggaaactagacctgatggccaaacagatctttgacaagctttggggcgatcaacaagaggcagtcttaaaagcctgtcaaatggtggaatcctgtctccataccgccgcaacacagaccgctaaggaacaagaaaatgttcaccgatgaggaaatcaaggaagacgctgattcatagtgaaaccagcggcttgatttgcggtgtgttcagctgaaaatgggcaaaaaaataacggtcacacaatccaaaaggactgtgtgaccgtatttatatcggttgttttgcctacgctactgcgtcaactttttactggcgcggattgcggatggcagcctgcgccgcagcaagacgagcaatcggtacacggaacggagagcaggaaacgtaggtgaggccaacgttgtggcagaactcgacggaagtcgggtcgccgccgtgctcgccgcagataccaagcttgatgtccgggcgggtggacttaccgagctcgcaagccatcttaacgagcttgcctacgccgacctggtcgagctttgcgaacggatcgttctcgtagatcttcttatcatagtaagcgccgaggaacttgcctgcgtcgtcacggctgaagccgaaggtcatctgagtaaggtcgttcgtaccgaaggagaagtactctgcttccttcgcgatctcgtcagccgtcagagcagctctcgggatctcgatcatggtgccgaccttgtaggtcatggaagagcctgcctctgcgatgagcttatcagccgttgcagtgacaacgctcttaacatatgccagctccttgacttcgccaacgagcgggatcatgatttccggaacgatgttccaatccgggtgcttagcggagacattcagcgcagccttgataactgcggaggtctgcatctctgcgatttccggataggtgacagccagacggcagccacggtgacccatcatcgggttgaactcgtggaggccggcgatgattgccttaacctgctcgacagtcttgccggtggacttagccagcagctcgatgtcagcttcttcggtcggaacgaactcatgcagcggcggatcgaggaaacggatgttaaccggctcgccttccatggtctcgtagagcttctcaaagtcgccctgctgcatcggctcgagcttagcaagggcagcttttctgccttcgacggtgtcagcgcagatcatctcgcggatagctgcgattctgtccggatcgaagaacatgtgctcggtacggcagaggccgatgccttctgcgccgaggcgctttgcatcgatagcgttctgcggggtatcggcatttgtacgaaccttcatctgacggaacttgtccgcgagacccataatgcggccgaagtcgccggaatcaacggaagccggaacggtcgggatgaggccgtcatagatgttgccggtggagccatcgatggagatgcagtcgccctcgtggtaggtcttaccagcgagctcgaacttcttgttctcttcatccatggtgatagcggagcagccggaaacacagcaggtacccatgccacgcgcaacaacagctgcgtgggaggtcatgccgccgcgaacggtgaggatgccctgtgcagccttcatgccttcgatatcctccggggaagtctcaaggcgaacgaggacaaccttttcgcccttctcgttccaagcctttgcatcttcagcggtgaagacgatcttgccgcaagcagcaccgggagatgcagccagagccttagcgaccggggtagcagccttaagagccttaacgtcgaactgcgggtgcagcagagcgtcgaggtttctcggctcgatcatgagaacagcctgcttctcgtcgatcatgccttcgtcgatgaggtcgcaagcgatcttcagagcagcagccggcgttctcttgccgttacgggtctggagcatgtagaggtgcttgtcctcgatggtgaactccatgtcctgcatgtctctgtaatgattttcaagggtgttgcagatgcctacgaactgctcgtaaacttccggcatgacttccttgagctggtcgatgtgctgcggggtgcggacacctgcaacaacgtcttcgccctgtgcgttcatgaggaactcaccggtgagaaccttttcgccggtggacgggttacgggtaaacgcaacgccggtgccggaggtctcgcccatgttgccaaatgccatcatctgcacgttaacagcggtaccccaggaatacgggatatcgttgtcgcggcggtagacgtttgcacgcgggttgtcccaggaacggaaaacagccttgatagcgcccatgagctgttccttcggatcgtacgggaagtcctcgccgatcttttccttatactcagccttaaactgatttgcgagctccttcaggtcgtcagcggtaagctcaacgtcctgcgttacgcccttcttagccttcatcgcgtcgatgagctgctcgaagtatttcttgccgacttccataacgacgtcggaatacatctggataaatcttctgtagcagtcataagcccagcgcgggttgccggacttcttagccataacttcaacaacgtcctcgttgaggccgaggttgaggatggtatccatcatgccaggcatggatgcgcgtgcaccggaacggacggaaacgagaagcgggttctcctgatcgccgaacttcttgccggtgatctgctccatcttttcaatgtactccataatttcagcctggatctcatcgttgatgcggcggccgtcttcgtaatactgggtgcaggcttcggtggaaatggtgaagccctgcggaacgggcaggccgaggttcgtcatctcagcaaggtttgcacccttaccgccgagaagctcgcgcatgctcgcgttgccttctgtgaacaaatagacatactttttgctcattggaaactacctccttgaaaatttacacggttaaaccgagtattaactgatttttccggcgaaaaaggcgtaaaaaacttattcactgtttcgccgcactctattataccaaatatatttgcgaatttccataccttttttcgagaaatcgtctgttttcggaaatttttcgcagaatttttcttttagacagatttttgcgccgcaaaacgattttttaaggcgggttttcccgcgttttcggacaaaataggcttgcaaaacccttttgcgggtggcataatataatataataatatatttgaaaagcgggcatgcccgcaaacacacacgcagagaaaagcgcagcggcgaagggtctccccctttcggcggctgtgcggcttctgcgtgcctttcggcatccccgaaaacgggcggtgcgaaaaagaagacaaaaacattgatgtaaaaaggaatattccatgaagcttttttctaaaaacgatcaaacttcgggcagcgcggactggctgatcgtgggactcggcaacccgggcccgaaatatgagatgacacgccacaacgccggttttttaatgctggacgccatcgcggagcactttaacattgaggtgcgccgcgtgaaattcaagggcctttacggcaagggcaccattgcgggacagagcgccgtacttttaaagccctccacctttatgaatttgagcggacagtccgtaacggaggcgatgagctttttccacattccgccggagcgcacgctgattgtattcgacgacatttcgcttgacgttgggcgcacgcgcatccgcttaaagggcagtgcaggcgggcacaacggcatgaagaatatcatttatctgagcggcagcgacctgttcccgcgcatgaagatcggtgtaggcagcaagcccgaaggttgggaccttgcggactgggtgctctcccgctttacaaatgacgagatgaaaacgctaaaaaccgtttccgaaaacgtaacgggcgccgtggagctgctcctctccggcgcgccggacaaggcgatgaaccgctataattcctgagcggctccccgaaaggaacactactatgcgtatgaattttttgaatgacgcgctcgggcgcgtgccggaataccgcgcgatcgaaaacgctgtgcggcagcgcaagacaccggtggccgtgacgggtttggcttccattcacaaagcaaatattctgcacacgctgctttctgccatgtcgaaaaaagcgctgtttattgcgggcgacgaagcggaagcgacgcgtatgctggaagacctgaacgcgatgggcgtgacttctgcgttttaccccctgcgcgatttcagcctgcgcgacacggagggcagctcgcatgaatatgagcgccagcgcatcgaagcactgacgctgctgcaaaccgggcagtgcacctgcattgtgacgacgatcgacgcggcattgcagtatgttctgccgccgaaaaagctgaaagagcgcacggtgaagctttctgccggacaggaaatttcggtagatgagattgtgcggacgctggtgcgctgcggctatgtgcgcgccgatcagattgacggcacgggtcagtttgcgcgccgcggcggcattgtggacttctactcccccggtggaaaagcaccggtgcgtgtggaattctggggcgacgagatcgacaccatctcgtattttgacgcggagacgcagcgccgcaccgaccagatcacggaggtgaccatctcccctgccgtagaggtcgtgccggacagcatgagtatccttgcaaagaaactcgaggcacacgcaaaaacgctgcgcggcaaggcggcgcctgccgcaaaggaagtgctgctgcgcgaggcggataaactgaaaaacgacctgcacattgggtgcatggacaaatattacacgttcgtttacgaaacagtcgcaacgctgttcgattattttgacacggatgcgctgctggtgttctccgaaggctcgaaactaaaggaacgcatgcgcacgacgctgtggcagtggggcgaggacgtacgcggattgcttgcggagggcgtgctgtgccgcgggcttgacatgtacaccgagacgtatgaatacgccttaaagcgcgcggaggacacggcgagcgtttatatggacgcgtttgcacgcggctcttacgacacgccgacaaaggtacttgtgaacatgacggtgcggcagctttccgtttggggcggcagcacgcagcttttggccgaagacctgacggctgcgctgcacaaccggcatgcctgtgctgttttagccggcacggagcgcgccgcgatgaacgtggcggcagatttaaaggccgccggtctgcctgcgggctattttgagagcctttccgccatcacgccgggcacagtggccgttgtggcgggtacgctttccgcaggctttgaatacccaaacgcgaaatttacgctcatcacgcacgggcgcatgagcgcgggcagccagccgaaagcgaaaaaaaaggacaaaaacagcaaggccgtttacagccttgccgagctgacccccggcgattatgtagtgcacgcaacgcacggcatcggcatttttgagggcatccacaaaatcgacatgcagggcatcacgaaggactacatcaagctgcggtacgcgaaaaacgacaccttatatgtgccggtaacacagctcgatttagttgcgaaatacatcggtccgcgtgaggactccggcgtaaagctgcaccgccttggcggcacggaatggcagaaatcgaaagcgcgcgtacgcgccgccgtaaaggacatcgcaaaggagcttattgttttatacgctcaacgcatgaagcagaagggctttgcgttccccgaagacaacgagtggcagcacgattttgaggcgcactttgaatacaacgaaacggacgaccagctgcgctgcatcaacgagattaaaaacgacatggagcgtgaagcgccgatggacagactgctgtgcggcgatgtgggcttcggcaagacggaggttgccttgcgcgcggcgtttaagtgcatcaccgccggcaagcagtgcgccatcttggtgccgacgacgattttggcatggcagcactaccagaccgttttaaagcgtatggagggcttccccgtggatgtggagctgctctcccgcttccgcacgccgcgtcagcaggacgaaattctgagaaaactgagacgcggcagcattgacctcatcgtcggcacacaccggctggtctcgaaagacgtgcagtttaaagacctcgggcttgtcatcatcgacgaggagcagcgcttcggcgtgcagcagaaagaacggctgaaagacgtgtgtaaatctgccgatattctgacgctttccgcaacgccgatcccacgcaccttgaacatggcgctttccggtatacgcgatatgtccgtcattgaagaagcgccgcacgaccgtcacccggtgcagacatacgtgatggaatatgacccgggcgtcatctccgacgccatcaaaaaagaactgcgccgcggcgggcaggtgtattacctgcacaacgatgtagcatcgattgagcgcgtggcggcgggtattcgcgagcgcgtgccggaggcgaggatcggcatcggccacggcaaaatgagcgagcaagagctctccgaagtctggcggcgtttgatggagcatgaaattgacgtgctcgtctgcacgacgatcatcgagacgggcgtggacgtgccaaacgcgaacaccctgatcatcgacaacgccgaccgcatgggactttcgcagctgcaccagctgcgcggacgcgtgggccgcagcacccgccgcgcttacgcgtactttacgtttacacgcggcaaggttttgagtgagatttcgcagaagcgtttggcggcgatacgcgaatttacggagttcggctccggctttaaaattgcgatgcgcgacctcgagattcgcggcgcaggcaatatcctcggtggcgagcagcacgggcacatggaaagcgtgggctatgacatgtacttgaagctcttaaacgaagccgtggccatgatgaaaggcgaagcgcccgagaaccccgtggaggaatgcaccgtggacatgcaggtgcaggcgcatatcccggaaagctacatcgattccaccgcgctgcgtttggacgtttaccgccgcatcgcagacattaaaacgtatgaggattcgagcgatgttgtggatgagctcattgaccgcttcggcgagccgcccgaaagcgtttatgggcttattgacattgctttgctgcgcaaccgcgcgacacagcttggcattacggaagtcaagcagcaggcaaacgcgcttctgctctacaaagataagtttgacatggagcgcgtgaagcgcctcattcagggcatgccgaacaaggtgatgctctccgccggcagccgcccgtacatcagcgtggcgctgggcggcaaggcaccgctcaccgttttggaggacgttttgaaagttctctgcggcgatgaggacgcgaaagcgccgaaacccgctacaaaataactggacattttgccgtatcggcggtataatgaacaacagcaaacctttgtgggcattctgtccgcaatatttaagaaaggtacggaacaaacaccatgaaaagaatcgcaaagattaccgtggcgctgcttttggccgttgccatgtgcttcagccttgcgggctgctacgatgaggatctgaactggtccgcaaagtacgacgacaccgagctgcctgccggcgcatacatttactacctctccattgcgtacaacgaagcggcttctaaggtctctaccgaagacgaggtcttgaagtccgaaatcgacggcacgccggccgagacgtggatcaaaaaccgcgcggacgagtatgtgaaccagtatttctatattcagaacgaaatgaagcgtctgggccttgaaatgaccgacgaggattacagcacatgcctccagaccaccgagagctactggaactactttggcacgagctttgaaaagttcggcatcgcaaaaacctcctttgacattgcgtattcccagtataacagaatgtacctcaaggtcttcaacgcgctgtacggcgagggcggcgaaaacgaagtgccggaaagcgagctgcgccagcacattgaggacgattactacgactacgagtatttctctgcgccgctgacgaagacggatgatgacaataaatctgttgacctgaccgacgaggaaaaggccgacctcaaggagacactggaaaaatacaagacgaagatcgaatccggtgcaatgaccgtaaacgacgccgcaacggactatgcgctcaaagtgcagaaggactccacctaccagaccggcatcaaggacgaaaacggtatgcagtcaagctacatgccggacgcgttcatctctgcgattaaggagatgaacgaaggcgacgtggaggtcgtggaatcgacaaagtacatgatcgttctgcaccgtctgccgatcaaggacgacgaagacacgctgctggagagcagtgacaaccgctcacagcttttgcttgagctgaagaacaccgaatacgccgatgctgtcagcgcggctgcacagagctttgagggcgtggaatggaaccagaaggtactgaaccgctacaagccctccatgtttgcggacaccacgaagaacggcacgtcttccgtcgcttctgaaagcagcgacgaaagcgcttcttccgaggagagcagtgcggaatcttccgaaacttcttccgagacgagtgagacttcttctgaatcttccgctgagtaaatcataaaataaaggcagcatgggtattgcttcatgctgcctttttgcttacaaaattttttaaaaggggacgagactatggacttttggaaacgggcacaggaactgaaagacgagatcacccaaaaccgcaggcgtattcatcagaatgccgaggtggggttgaacctaccgaacacaaaggcatttgtgatggaaaagctgcgcgaatacggcctaaagccgacagaatgcggacatggcgtgacagcgacactcggcaagcccggcaaaacgcttttgctgcgcgccgacatggacgcgctgccgatgccggaggaaagcggcgagccgtttgcctgccccaccggcgaaacggctcatgcctgcggacatgatatgcacacggcgatgctgctgacggcggcgaaaatgctgaaagaaaacgaagacgcgctttgcggcacggtgaaattgatgttccagcccgcggaggagacattcgaaggcgcgcgcgatatgctggaaaacggattgcttgaaaatccgccggtcgatgcggcactcgcgtaccacgtggcggcaggcaaatcgcccgtgggctttgtgatgtataacgactcgggcgtgatgatggcttccgtagacggatttgagattacggttcacgggcgcggctcgcacggtgcgaacccgaaccttgccattgaccccatcaacgtaggcgtgcacattcatctcgccttgcaggagctcatcgcgcgcgaaagcgacccgacaaagacgtgcgttttgacaatcgggcagtttatggccggaaccgccgcgaacatcatcccggacacggccgtgctgcgcggcaccatccgcacgaacgacaaaaaggcccgcgcactgcttgtacgccgcatgcgcgaaacggcgcagcgcacggctgccgtgtataacgcgacagtggagatcaggacgctttccgaagtgtgcccgctcgtgtgcgacaaatcggtgacggacaacatgctgcgctacatgggcgcgctgaacattccgaactttacgccgtacggcggcatttcggcgacaggctccgaggactttgcccttgtggccgaacgtgtgccgagcgcaatgatgtaccttggcgcgggctacatggacgagcgcggacagtacaccgcgcacaacccgaaggtcgtcttcaacgagggcgtcctccccatcggcgcggcgtgcatggcgcattgtgcggtggagtggcttaaagagaacgcgtaataacagaaagcttaaaatcccgttcactttcggtgaacgggattttaagcttgtcgaaaacagctgctttggaattcaatcgataatggctttgacgagccgggaccaacgctccgggtagcagactaaaagctctttgtgctgcatattttgttcgtgcaggacggtttgggttttgtttagtaaataccctcgccgcgttttgcacggtggatgacgtggtaatacatgggaatgaggaagctatcggctaagatccatgcgatcgggccggagaagcaggcggcgttgaagccgaacagcggcacgaggaacagacccacgccgccgcgagcgatcatctcaaacacaccggcaaagagcgcgaggcggctgtatcccatgccctgaatggtaaggcgcagcacattgacaaatgtcagcgggatcataaaaaggccactgcacacaaggtaccaataggcagaattgataatggcagtctcaccggcatcgacaaacagaagaagcatccatttgccgaggaacacgatgatgagcagtgccagaacggaatagatgatgccgacgatgttgcaggctttgacgccctgcccaatacggtcaattttacgcgcaccgatgttctgcccgctgtatgtagacatggtaacgcccatggcatcataagcgcaggcgaagaacatatagagcctgctgcccgctgtgatgctggcgacgaccgtagagccgagggagttaacggatgcctgtaaaataacgctgccaatggccgtgatggatgtctgcaatgccatgggcagacccatgcttaaaaggcgcttgatgcacggcacgttgattttgaaatcctcgcgggtcattttgaggacttcataatgcttgctcacatagaggagacatacaacgccgccgatgagctgtgaagcgaccgttgcgaccgccgcgcctgcgacgcccatggggatgaaaacaacgaggacgatatcgagcacaatattgatgatggacgcgatgacgaggatgacaaccggcgtgcggctgtcgccgatagcgcgctggatgccggcaagcatattatagaggaacgttgcggggatgccggcaaaaatgataacaaggtacgcgtaagcgtcgtcgatgatatccgccggcgtgcccatgagctctaagatattgcggcagaaaatgaccgtgagcaccgttaagacgatgccgaagccgacgcacagccatacggcgttgccgatgaagcggcgaagctctttataatccctgctgccgaagcgctgcgccaccgggatggcaaagccgctgcaaaggccaaggcagaagccgatgatgaggaacgtgatggatccggtggagccaacggctgcaagcggccccgtgccaagcacgcgcccgacgatcatggtatcgaccatggaatagaactgctggaacaggttgccaaaaagcagcgggatggagaacccgaggatgagcttcatgggcgaaccgctcgtcatttcttttgtcatactgaaaatttcacacctttacgggaaaaataacattcaaagatttctcatacagtttaccaccgcaagtgggatttgtatatcccgtaaaaacagaaaaaaggacagcatgcgccatcctttttttatgaaaaattataaaggctgttttatcaaagaaattacatctttgcaatcttgtctgcccactcaagaaccttcttggtgtccgcgtcggtcggcatgcccttcttgaagaggccgcccttgacagcgatgcccagaggctcaccataggtctcaacgccgttcttcttcatcgtatcgatgatggaagaaagaccgtccgtgttaccgttgctgttcagaacatagaatgcgacaccctttgctctggtggggttgagatccttgcagaagtgatcgactgcgcccgggagcttgccgttcatttcaacgccgataaaaacgaccttctcgccctcgcacgggtatgccggggggatctggtcacatacgcactgcataactctgccgatttcggatgcgatcggctgtacgttgccgctcttggaaaagtgaagggactttgctttcattttgactgcctcctgtaagttcgcgggccgcaccggcccgttatccatattaagtgattatttctattataacacggattcaaaaaaaatcataaacagaatgtgaatttttgtaagaaacttgtaagagaacgtgcgggttacacaaagaaaaagatccatttatggacggaatattaaaaggcagacgaattcgtcaaaacgtctattttattatcgatatggaagcactttttcgagaaaactcccgtaaaatctcttgtaaaattccgcaaataatattataatggagacgtattatgttatgacctacggcgcaaaaagcaggtctttaccccttttgccgccgctctttgaaaataatgaagcaggaggtgattttttggcaaaagaagctctggacgccgtaaaggatgcggagcagaaggccgccggcattctggacacggccgctgcacgctgcgccgccattcggcaggacgccgcacaaaaggcggacaagctgaagacggagcgcatgcagaaagcaaaagcggaccttgcagccgcaaaacaaagcgcagagacggccgctgcggccgaacaacgcacagcgcagcaggaaactgccgcactggcggaggatatccgcaaaaaagcgcagcaaaacagcgcgaacgtaatccgcgctatccgcgaggccatcaccggctgacgcggcgccaacacgaaaggaggggatccccctatggcggtaatgcctatgaagcgcatcagcatttatgcgctcaagaaccgtcgtaaacagatcctggaactgatccagcggcgcggcgtcgtggaaatcgatgaccgcaaagcggatgaaacggtttttgccaagatggataccgtcccggcaaaatcaagatttgaaaacaatgcagccgcgctgcaatcggcgttagacgcgctcgataaactggagccgcccgaaaaaagcctcttcgcgtctctgaacggacgcgacgcgataccgctttccaaatatcaggaaacggctgacggtgcgggcgagcttttaaaaattgcctcgcgcatcaacacgctgtggaaaaagtgtgcggacaaccgcacggaaattctccgcttgcagacacaaatccgtgcgctggagccgtggatgaagctggatatttccatgcgcaccatcagcacgccgacaacctccgtgttcacggggtcgttcccggtagaatacacggaagaaacgctgcgggcgaaaatcgccgaaggcgcgccggacgtggacggtgtggtcgtagagattttgagcgcttccccgcagcagacatgcgcgtttttgatgtgccacatctcgcagggattaaagcttgaaacctacctgcgttccatcgggtttacgtatccggcggagccgagcaaggtgccgcccgcagagcgcgtggacatcctgaacggacgcattgcggcgctgcaaaaagagatcgataaaaacgaagcggaaattcgcacacataaaaaccggcgcgaagacctgttttacaccatcgattactttacgatgcgcaccgagaaatacgatgttttgggccgcttatggcagagcccgcacgtgtttctcattacgggatacattccggcagagaacgccgaggcgcttaagacggagctcacgaccacgcaggaagcctacgtggagctgtgcgacccgagtgacgaggacgatgtgcccgtgaagctcaaaaacaacaagtttgctgccccggtcgagggcgtactggaaagctacagcatgccgggcaagcatgaaatcgacccaagcggcatcatggcggtcttctattactttctcttcggcatgatgctttccgatgcgggctacggacttgtgatggtccttggctgcggcatcatcttacacaagttcaaaaacatggaagaaggtctgcgcaagacgctgacaatgttcctctattgcggtatttccacgatattctggggcattttgttcggcagcttcttcggtgatgcgatcaccgttatcgcaaagacattcttcaacaccgacatcgtgataccacccttgtggttcacgccggtcgatgaaccgatgcggctgttgctgttctcgttcctcgtcggcatcatccacctgttcgccggcctcggcgcacagttctatcagcttgcaaagcagggcaagtggctggacgcgatctatgacgttgtgttctggtatctgctcgtcggcggcgcgattatttatctgctttccatgcagatgttcgccgacatggtggcgctttcctttacgctgccggcatcggtgggcaccgcgggcattattgcggcaggcatcggcgcggtaggcattgtgctcacttcgggccgcagctccaagagcatcggcaagcgcttcttaaaaggtctttacgggctgtacggtgtttcgagctatttaagcgacattctttcttactcgagacttttggctctcggccttgcaaccggcgttatcgcttcggtcttcaatcagatgggcgccatgcccggcaacaacccgctcggcgtgattatctttattttcgcctttgtagtgggacacacgctgaatatcggcatcaatgtgctcggcgcgtatgtgcacacaaaccgcttacagtttgttgagttcttcggcaaattctttgagggcggcggacgcaaattcgcaccgttcaccaccaaaaccaaatatttcaaaattacggaggaaaaataacatggataagttcgatatcaactctctcggcatcgttctcgcgcttgtcggcgcagttctggcagcacttctcggcggcatcggttccgccatcggcgtaggcatgaccggtcaggcagccgcaggcgtcgtttccgaaaatcccccgctgttcggtaaagtccttattcttcagcttctgccgggtacgcagggcatctacggcctgctcatcgccttcctcacgctgacgaacatcggtgttctgggcggcagcgcagacatctcctttgcaaagggccttctctatcttgcagcctgcatgccgatggccgtgatcggtctcatctccgcaaagcagcaggcaaaggcagccgtttcttccatcgcacttgttgcaaagcgcccggatcagttcggtaaagccatgatcttcccggccatggttgagacctacgcggttctggctctgctcgtttccctgctggctgttgcaaacatcggcggcatcgccatctgatgatccactccccaaaatgcaaaaaagaaaggaagaggatcgatccatggcaacaggactggacagaattatagaacagatccttgcggatgccgaagcgaaagcggcggaacaggttgccgctgcggaagaagaagcaaaaaagacgcttgcggacgctgccgccgaggcagaacagaaagcaaatgtcctacttgcggacagtgaaaaagtcggcgcggacattaaagcccgtgcggcttcgaccgcggaattcacacgccgccgcactgtacttgccgcaaagcagaacgccattcgcgatgtaatcgtggcggcacagaaagagttgcacgatctgccggatgacgaatacttcagcgtgcttttaaaacttgcgcagaaaaacgcgctgccgggcgatgctgaaatgcagttaaacgaaaaagaccttgcgcgcatgccgcaggatttttcggcgcagctgaaaatggctgtgcccgggacgaacatcaccgtatcgaacacgccgtgcaatatctcggacggtttcctgctcgtttacggcggcatcgacgtgaactgcacgttcgcttcgctgtttgaggccgccggagacacattgcaagaccttgcgggcggcatgctctttcgctgagccgccggcagaaaaggtggtttaacgaatggaacaggaatacatctatgctgtggcgcgcattaaagcgcgggagctttcgcttttgacgcagcaggatctggacaggctgatggcgtgcaaaacgccggcagaatgcttccgtgcactggccgataagggctggggcgctggcggcgaaacctctgccgaggcaatttttgccgccgaggaggagaaaacgtgggcactcatgcacgagctgctgcccgacctcacgccgttcagcgtactgctgtatcccatagacttcaacaatatgaaagcggcggtgaagtgcaccgtcacaaacgcggagccgcacaacgtgtttatgtccggcggcaccgtggagccggaaaaaatgcagcaggcggtcagagaaaatgacttctcccttctgccggactttatggcggaagccgcaaaaaaggcgacggacgcgctgcttaccacgcgcgacggtcagcggtgcgacatcattttagaccgcgcatgcctcacggcgatccacaagaccggtaaagagagcaaaaacgcgctgattacggcgttttccgagtttaaggtggcggcggcggacattaaaatcgcggcacgcgctttgcacaccggcaaaagccgtgcgtttttggaagaaagcctcgccccgtgcgacacgctggatctgaaagagctcattgacgcggcgtcgaaagacacagatacgttttacgcatacctttcccgcacagactatgctgacggcgtaaaggcgctgaaggacggcttctccgcgtttgaaaaatggtgcgacgaccgccagacagcgcttgtaaaagaaatcagccgccaggattactttacggtggcgccgctgctcgggtatgttacggcgcgccaaaaagagatttctaccgtgcgcattattatttccggcaagcagaacaacctgccggatgagcgcatccgtgcacgtttgagagacctgtaaagaaagagggaaacaaaatgtacagagcagcagtcatcggagaccgcgacagcatttacggctttgccgcgctcggtctggaggtctttcccgtgacggattcggagatgggctccaaaacgctgcgccgcttagcggagggcgaatacgccgtgatctacattacggaagcgcttgccgccgagctggagcacgagctggaccacttccgcctgcagccgctgcccgccatcatcccgattcccggcgttacgggcaacacgggcatgggcattaaaatggttaaaaaatccgtggagcaggcagtcggctccgatattatctttaacgacaacgattaacgaaacgggtgactaagcacatgagccaaggcacaatcaaaaaagtagccggtccgctcgtagttgcaggcggtatgcgcgacgcgaacatgttcgacgttgtgcgcgtcagcgaccagcgactgatcggcgagatcatagaaattcacggagacgaggcctccattcaggtttacgaggagacctccggtctcgggccgggtgcgcctgtggaatccaccggcgagccgatgagcgttgaactcgggccgggccttatcagctccatttacgacggtattcagcgcccgctgaccgccattatggaaatgacgggcaacaacttaaagcgcggcgtggaggttccctccttaaagcgcgatgtaaaatggagcttcacgccccttaaacaggtgggcgacgaagtagaaggcggtgacattctcggcaccgtacaggagaccgagatcgtgctgcacaagattatggtaccggcaggcgtgcgcggcacaatccgctccatttctgccggtgaatacaccgtaacggacaccgtggcggtcattgacacgccgaacggcagcagtgtgaacgtatcactgatgcagaagtggcctgtccgccgcggcagaccgtaccagaaaaagctttcgccggatatgccgctcatcaccggccagcgcgttatcgatacgctgttcccgattgcaaagggcggcgtagcggccgtaccgggtccgttcggcagcggcaagaccgttgtgcagcatcagcttgcaaagtgggcggaagccgacatcgttgtgtacatcggctgcggcgaacgcggcaacgagatgaccgacgttttaaacgagttcccggagctcgttgacccgaaaaccgggtattcgctgatgaagcgcaccgtgctcatcgcaaacacgtccgatatgccggttgcggcgcgtgaggcatccatttacaccggcatcaccattgcggagtatttccgtgacatgggctattccgtagccctcatggcagactccacctcccgctgggcggaggcactgcgtgaaatgtccggccgtctggaagagatgccgggcgaagaaggctacccggcgtaccttggcagccgtctggcacagttctacgagcgtgccggccgcgtcattacgctcggcagcgacaaccgcgagggtgcgctttccgttatcggcgccgtttcccctccgggcggcgatatttcggagccggtctcacaggcgacgctgcgtatcgtcaaggtcttctggggccttgatgcaaaccttgcgtataagcgccacttccccgccgtgaactggctgacctcctattccctttatgtggacacgatggcgaactggttcaacacgaacgtggcggaggactggatggatctgcgtgcgcgtttgatgcgcattttgcaggacgaagcagagcttgaggaaattgtaaagcttgtcggtatggacgcgctttccgcgcctgaccgcttgaagctggaggctgcacgctccattcgtgaagacttcctgcaccagaacgcattccatgagacggacacgtacacaagccttgaaaagcagcacgacatgatgctgctggtcgttcacttctacgaccagtgcgttgcggcgctcgacaagggcgcgaaggtggacgacctcatcgcgctgcctgttcgcgaaaaaataggtcgctttaaatacacggcgaacgaccgggtctccgcggaatacgatgcgatctgcgcagagctctctcagcagattgacaaagccattgaaaacaaggaggacttctgatgccaaaggaatacagaaccatacaggaggtcgcaggtcctctgatgctcgtaaagggcgttgaaaacgtaacgtatgacgagctggcggaaattgaacttgcaaacggtgaaaagcgccgctgcaaggtgctggaaattaacgagggcaacgcgctggtgcagctttttgaaagctccaccggcatcaacctttcgaacagccgcgtgcgcttcctcggcagaacgatggaattgggcgtaagcgaagacatgctgggtcgtattttcgacggcctcggccgccccattgacgacggcccggagattttgcccgaccgccgcgacgacatcaacggtctgccgatgaacccggcggcccgcaactacccgcaggaattcatccagaccggtgtttcggccatcgacggtctgaacacgctggtgcgcggccagaagctgccgatcttctccgcttccggtctgccccatgcccagcttgccgcacagatcgcacgtcaggctaaggtgcgcggcacgaacgacccgttcgtcgttgtgtttgcggctatgggcatcacgttcgaggaatcaaacttcttcatcgaaagcttccgcgagacgggcgccatcgaccgcacggtcatgtttgtaaaccttgcaaacgacccggccattgagcgtatcgcaaccccccgcatggcgctgactgctgcggaatacctcgcttttgaaaagaactaccatgttctcgtcatcatgacggatattacgaactacgcggacgcgctgcgtgaggtctccgccgcacgtaaggaagtgccgggccgtcgcggctacccgggctatatgtacacggacttagcgtccctgtacgagcgcgcaggccgccagaacggcaagacgggttccatcacactgattccgattttaacaatgccggaagacgacaagacccacccgatcccggaccttacgggctacatcaccgaggggcagatcattctgagccgtgagctgtaccgcaagaatattgcgccgccgatcgacgttctgccgtcgctgtcccgtttgaaggataagggcatcggcgagggcaagacccgtgccgaccacgcgagcaccatgaaccagctgtttgccgcctacgcacgcggtaaagaagcaaaggagcttatggtcatcctcggcgaagccgcgctgacggacatcgataagctgtacgcgaagtttgcggacgcctttgaaaacgagtatgtttcgcagggctacaacacgaaccgcgacattgaagacacgctggagctcggttggaagctgctttccatcctgcccagaagcgaactgaagcgaatcgacgacaagtacctcgatcagtattacggaaaggtgtgatgcgcggtggcaggcacccaggtaaaccccaccagaatggagctgacgcggctgaaaaagaagctcgtcaccgccgtgcgcgggcacaagcttctgaaggataagcgcgacgagctgatgcgccagttcctcgataaggtgcgcgaaaacaaagcgctgcgcgaagaagtggagacggcgctcgtctccgctaaccagaacttcatgctggcgcgcgccggtatgccggacgaaatgctgaacaccgcgctgcttgcgccgaagcaggaactgacaatctccgccggcacgcagaacgtgatgagcgtggagattccggattttgactttaagacgcgtacaccggaccagaacgacatgtactcctacggcttcgcttttacgaccggcgaccttgacgacgcgatcctttcgctttccgagatcttcccgaaaatgctgaagctggcggaagtggaaaaatcctgccagttgatggcggcagagattgaaaagacacgccgtcgcgtcaacgcgctggagcacgtcatgatcccggagctgcagacgaacatcaagtacatcacgatgaagcttgacgaaaacgagcgctccacccagattcgcctgatgaaggtgaaagacatgatgctgaaagaagcgcatcattatgagtattaaagcttaaacagacgagacccccgaagtgccaaagcgtgcttcgggggtctcgtttttatggaggagattatttattaaaatacataattcacaagcaagatcacgatgccggtgaggatcatgaccatgccgacgacgcggttcagggtgacggcactggcgcggtttgcgatggcggcggcaatcttcgcccaaagaagcgtgaaaacgacgcaaagaacgaggcatgtgacatccggcatgccgccgatggcgaagtggctgattccaccggtcagcgcagtgaacgccatgatgaacacactggtgccaaccgccatgtgcatctcatagccgaggaacgacgtcaaaacgaacagcagcatcatgccgccgcccgcgccgacgaagccacagataaacccgacgaggacaccgccgacgatggatttgatgaggcgttccttcggcgtggccgcggccatttgctctttggtcgttttgaccggctttagaaggaaacgcaggccgatgaagatcatggcaatctgcatggtgccgctcatggcgcgctccggcaggagacttgcgacaaaactgccgaccaatgtcataacaagcacgctgatgagcagcggcaggctgtttttgacgtcaagatttttatgcttcttatatgtccacgcgcttgtggcgctggccaagacatcgcttgcaaggccgatgccgaccgcctgatacgccgggatgccgaggaacgtcataagtattggcccgatgaccgcggcggcgctcatgcccgcaaagcctgtgccgatgcctgcgcccgcgcccgccaaaaagcagacgaggattttgactaaaagctccatatcagttcatcctttccgtttccgctaagccttctgcggcgttttcgcacattttgtcaaacagcactttgtactgctcggtttctcccggcgtgaagcccttaaagagctgcttgccgaacacctcctgcgccgcttttcccgccgcgatggcggcttcggcacttttcgtgatgcgtaaatgttgacttttgcggttgcccgcagcgtaatgcgcttcaatccacccgcgcgcttcaagttcctttaacgccgttgaaacgtgcgattttgtgaggtggcgcgttttgactaaatcgcccgccgtatcaaactgcgggttattgtgcaggaacattaaaatattgaattgcatctgcgtcaggtcatatgcatcacgcaccggctttgtgcacgcttcgtaaaacgccgtaagagatttttgccgctcccaaaagatcatatactcacttactttcgttctattttgaaccatattatagaacgagaagtcagaaaaatcaaggaacaaattgtaaacagcaaaatatttttgagcagcaaaaagcagccccggtgcatttttacaccgaggctgcgcgcccctaaaacgatgccgggggcagtttggctcaattttagccgaagacagattccgggtctaccggctcgccgtttctggtgacttcgatatgcaggtgggaatcgagcgcggactcaaacggcgcggcggtcacgctgccgatgtcctgcccggccgtgacgacgtcgccctcatgcacgaggaacgtttcaccgagtccgcaatagcgcacttcgtaatcgccgtgctctatcacaatcatattcccgcgcagcatgtccgtatgcgtctcttttacaattccgtttgcgcaggcgtgcacggtttcgccgtgcgccgcggtgtaatccgtgcccgcgtgcacgcggtagtcgcgcatcgtttcggagtataccggcgtatcggaaaactccgtcatgacctcccccggtaccggtcgggtgagcgtttcgctgaccgtatacgtcggctcggcagcggtctcttcgacgggcgtttcttctgcaggagcgttcacttcctgcggctccgcttctgtgcttgcggagacctccggcacagtgccctgcgcgtggcccgcagaaacggcgctctccgggtcatcgtctacggggacggatgtttcaggcgtggggcgcggtgtggatgcggcggaagacgcactgctctcgctcccagtgggctccaagaacccggaaacggtatcgtatgtgctccacgccgcaatgccgatggccgtcagacacacggcaagcgcaaggtaaaacccgcgccgctccgtactctttttgcgctccgcttcggttttttcctgctttttaaagtgcatagccatatttttctctcctgtttttagcgtcattgggtttctttacccgtagtatgggcgagtttgagaaaaatatgcaactatacttcggtccgcggattttcggcagacggaaactttcagtttcaatgctgcgcaaaatcggcacttctccgcgctgaaaatgccattatacaaaaggaagaaggaccgatgcggctcggtccttcttccttttagcttgaggggtatattgaggagggtagaacatgtatccaagaaaggtgcggttccttttctttcgaatacgcttatattataccgcggtttcaaaaagagttgttaaatagccatgaataaacgttaaagattttggaacgcatttatgaacgcttttttcgagaaaatccgcagaaaaagcaaacaatcgtttgcatttttcgaaaatatatgatacaatggttttaattaaagaactgcccatttctacgggactgattttgtattaaaacggaggaatcgcatatggcgagtttaacgaaaagccagcagcttgtatatgactatctttgctccaccatggcggaacgtgccgtgccgccctctgtgcgtgagatctgcgcggcgaccggtttgcgctccacctctacggtgcattcccacttgaaatctttggaggcgcttggctatatcacacgcgatgcgggcctgaatcgctccattcacattgtaggcgcatctgccgcaaagcaggtgccgattctcggcaaggtgacggccggtctgcccattctggccgtggaagacattgagggctatattccctacccggacaaaagcggcaaggagcttttcgcgctgcacgtggacggcctgagcatgatcaacgccggcattctggacggcgactatgtcatcgcagagaaaacgcccgtggcggaaaacggcgagatcgtggtcggcatgatcggcgatgaagccaccgtgaagcgcttctataaggagaagggcacgttccgtctccagcccgaaaacccggatttcgagcccatcatctccgatgaaatcaccattctcggcaaggttatcgcggtcattcggtattattaagctttaaatgcataaagaaaagtcttggcgacacagcaggagctgcaaacagtcgccaagactttttttgataaaatcgtacttctcagtgcatcttattttcaattccggctaaatctccatacatattacgaatcgtacttgaaatattctgtatcggaagacgtatctcgaacggagacagagaaggaataatcgccgaaatctgtttggagaaccgcttcttcggagccggattgccaacgaatatccatttttgttccgttcacttcagccacgatttttgcatttgcagaaaaaacaggaaactggtttcgcatccgcaaaagctcgatttgtttttgcacaatcggctttttcattccggcagctatatcagagcttgtcaggttcgtgcggttgatttctttatgcccaccggcacccgccctttgaacggcagcataatcattacgaccggcaaacagatccagataccaaacctgcggtttgcccggcatgaaaagctgtattgctcgtgccagaagcatttttttgtcatcttctcccagtgcactgtaatacgtagcatttacttgatagtatacgttttttgtgccgtgcagatctttcacatatccaccacgggacaccactgtatcaatgaggctttggattctttcttccggaagcagcccttttaaatccaacagcggaataccgtcatgacagcccaacatattaacagtcagcattttgcggtcacagatttcccgtatccactgtacaagaacttctccggaccttcgttcaagtgcatccagcaataatccgggtaggaaaaagtcatacaccatataccctttttctgcaatcgtgcggtatgttccctccgcatagctggcatgtatctccggcaaaagcgtgatacccagcggttttgccaaatctgtcaccttgccgagcagctcccatgttcccggatcattcaagaaattccgtgcacccggctctttcggtgcataggcaaaggcatccaggcgaacgatttttgcgccgtaaccggcaagtgtttgcagcgtatttttgtagaattcccaaacgagcggtgaacggatattcagatccatctgacccaaatatcgacgatttctttccatgaagtcaaccaccgcaccgcgatacacctctaattgaccaagttccgtctgctcgggccatttgccctgctcgacagccgcattgaccaaagaagccaaccgaactgccggagcatattttccgtgtgtgattgccataaagtcctgcgcatctacatggggatagacaacttcctgatagaaagtattccaatacggaacattgctgccgtcaggaaactgcaccattaaaatcggcaagccgggtttacggaaaaacatattttgcagcagttcggggtccggccggatatatccctcctcggtcatcgttccatgacctgcccaaaatctgttccaatctataaagaagtcacgatagagggattgttccccgtttttcagtatatcctgaaattgctcggaaagcaccgaagcatgatttagtacaaaatccaacttcaagtcaattcccattgagcgcagcgcatcgagatccgtttgttctgccagcaagtcattgagtcgatagtctataacagaaaatccgcgatcaagatcggtgttgaacaggcttggaagaatatagaacgaagaaaatacgtccttcatttccggctgttccaaaaacgatatacatccctttaatgtgccgcccaagctgtcaggataagcattcagcatcgggccaaggcagaaatcaccgtcacacatacaatatctcctatcgaccggcgtccatttgccgcttaaactgttcgtaagttaaaaagtcgccggattttgacaagataatttttgcagcatgtgctcggttttctaacataccctgctctatctccaaaaccatagcaataaacggcgtatctgtatttgcatctcgagcacgaagcagacggtattttctcgtttcagccggtgtactgttcagcaggatcggaatatccacaccgtcaaactttccgcaattgccgtgcgtccattcgagaataatcaccgaaatattccgaaaatccttttcttcataccaaagctccgtctccgtgcggcccattcgtttcagccatatcttatccgcaccgcttttaaactgtgtcagcgttttggacagttcatcgaattcctgttcctgttcggaaccgagatattctgccaacgcctttcgaccggctttttgatatacggtcagccacgggtatctgtctgcttctttcgatgcagagtccgtttccgcttcctgcagtgctttaagttcacgtgcggcatccggggtataaacattctgctccagcataccgcgtatgcctgctaaacggaaaattcgcatacgttccgcgtcattcaaagaaggaatacgacgagggtaattgtcgccggacagcgtatagcacccgattccgagttgattaaaatagtatgtcaaaagggatgaaatacccgtttttcccacgccggatccaccacacaccgtaataaccgctcgttttgccggtgatttttccagaacttcgcgcagcataggtaaaactaccggaaaaatctttgcggctttttctttctgctgcggtccaatccatattttgtctcccggagtatctccctgcggaatatcttccggaatttccgggggctgccatgcctgcatggctttttcaagcgtcaacatcaaatctgcagtcaagtttacttacctccatatttttataatctcttgccttcttctgcctttttgaacgaaagccagctaaaactgttaccggattgtacaaaatggatcggaagatcacacgcaagcactttcggcaaccactgtgccatataccgcattccgggttcttccaaattgaagtgtccgacattcagcagcgcgcgtcggattcccaaagtatttgcatcctgcacatactcaccgattgtccaatcgatcacctcaccgggaatgatcaaatcgcaattcattttttcaatgagctgtatattttgcctgtcccagtccgttccgaaaaaatgtccgacgatagctacgcgctccacaggcatttcagggtctcctataatgcgaattccgtcaatctgcatggtatgcgcaacatgctccgccaccgcgcggaccgtagtgagcggcaagtggtacgcggttcccggaaaatagttttccgtctcctgatactgttcccagccgagcattttagccaacccggaaaagataccgtcgggtctatgattgtggatatgatcgtgatcgcggtatacaacgataccgagacggtcaagaagttgtttttttgcctgatacacacagttatcctgaagccaatcggtctcgtcccatccgtcgtagaaaagcggctcatggccgatgattaaattgcatcccagctcagcagctttatgaatgacctctgctgttgggcaacaagacaacacgattcctgtgcagacctgatccggatcgccgtactgcacgatgtcgcacgttctgcgctccggctccagcggtccgtgatatgcttctaatttatcaatgatttctgaaattttcattgccgtattcctttgctttacactttgttggcacccatcttcttgtagacatcccctctgtcgatccagtcgaggaaattattgatttcaagatcccaaatggcaaattcgtgctcataaccgggcaggtcatcatagcgcagccgaccgctcttccagatcggttcaacaaattcatggtattcctgcacattcttataaaggaaatctctgtcgccgatgctcaggaagagatccggcagctttttaccctctgccacagctttttctgtcgcagcgtaaagatctatccactgcggccccttcgtctttttgctttccatatcctttttcgagaatacggccggagataatgcaccaatcgcgctgtaccggtccggattctcaatgccgtgcagcaacgcgccgtagccacccatggaaaggcccgcaatatagcgatccttcggactgtcggaaatcgggaaataggcttcaacaaattcaggaagttcgtgattcaggaaatcgtagtaattgtcgcccatatcatcattcatatacgccttgtttccgacagagaatgtaacgatagcaatccttttttcttctgcatatctctcaacgcttgtatagcggagccaagccatatagtcgtttcccataccatgcagcaaatatacaaccgggaattttcccgacaggctgtgtgtatgcgggtcatccatattgcaggatgtaaaagacggaagcgtcacttcgatatcaacgccgtgacaaagtgaatatgaaaagaaattgcaatggatctgtgccatacttttacctccaaaataagcagttctttaaaacgcgttaaatacgatcatttgtataaaccagcatcgcatgaccgacacacataatttgtttttgtgacggatccgatacataatcgtaggtctcacattgatccggatgtgcaatgattttctcacagcaatccatcatgtccgtcaaataaacgggagaaatcccctgtacactgtgccctgtatagagctttttaacattttggcatttgggaagcgcctttttcaacgcatcgcggaacgccgtaacagtaagatactcagggtaatacggagccggaaatctgccgatgatcaatgtcggcgtaaaaacaaccgcgtctccgctgaataaaaggttatacttacggtcaagcagcatacagcctccggctgcatgccccggcatatgaatcacttccacttcatgtccctcgccgagacggaaaacaaaaccgtcctccatcgcgacatgcttcgcagactgcagaggaataatgtcctcctcacggtatgttcccggtgcaggcaatagtctgttctctgccttttcggacatttccagatacagaatatcgtacttatgaataaaaatggtttcaaattggccgttgcccgcactgtgatctccatggaaatgtgtattgacgacatcgaccggtttatctgtcaaagtctcaaccagactgcgcagatcaccgatgccaaacgccgtatcgatcagcagtgcccgttcctgtccgacgatcaggtgcatccacgcacttgcgcccttgctgtgtgcatcataatagatatgaaaaacaccgggcacatcttcatcttcaaaaaccataacataaggatctacatcgtagactttatgctccttttcacagagcgatgctgcgtaagcatcactttgttccatatattttttccagtcagacatgctcttcctccttttatcagcccttgacgccgccaatgacgatgcctttgacgaaagatttctgaataaacggatatacgatcatgaccgggataacagccacgactgcgattgccatacggatgctgacactcggaagcgtacccatttcaatattgatgccctgcagctgcgttgcagttttgagaaactgaatgttgttaagcatattcgtcagaacgttctgaatactgtacagatccgtacgttttacaaggtagtacagaccgttcgtccagtcgttccagtaagccagaccggacatcagaccgatcgttccgatgatcggtgttgacataggcaatacgacgttgacgagcgtacgcagttcacttgcgccgtccagctttgcggcttcgatgatcgcatccggaatattcgttttaaagtaattgcgcattagaattacgttaaacgggctcatcaaaaagctcggaatcaaaagagcaaagattgtatcgcgaatatgaaagaactgcgaatacataatgtacgtcggcacgagaccgccgttaaagagcattgtaaaaaacacaaagaatgcgatcgcatttcgacctttgagacccgggcgtgcaagcggataagacaggcataccgtcatgcatacattgcaaaccgtaccaattgccgtgacaaagaatgtaatgccatacgcgcgcaaaaccgtttttcctgttttaaagatatacgtataagcatccgcactgaatttttccggaaagaaggaataaccgttcagcataagtgtttgttcatccgtgagagatgccatcaacaggagcaagagcggaagcaagcacaccaacgttaagattatcagaacaatatgcggtataattttagcagacttacttgtggtaatcatagtatcatccctttcccgtataatcagaacaacgcgctttctttatcgatctttctcgtaatcatattcgtaatcataaccagaacaaaaccgagaatagactgtaagaaaccggctgccgaggaacgaccaacatcgttgagttgaaggagtccgcggtaaacatacgtatcaattgtgtttgttacactgaacagaagaccgttgttcatcggcacctgataaaacagaccgaaatccgaatagaacattctgccgatgtgcataataaccaacgtaatgattgtggtcttgaggcacgggagcgtgatgtgacgaatctgctgccatgtggaagcaccatcaataaccgccgcctcataataagaatcgtcgatgccgatcagagtcgcaaaatagaggatagacgaatagccgaagcttttccacagataaatgaacgtgaggataaaaggccagtatttcggcgaggaataccagctgatctcgtccataccgagcagctttaagattgaattgttgataaaaccgttatccgagctgagaaatgcaaatgccagatagctgacaaccgtaatggacagaagatacggaatcagaatgctcgtctgataaacacgcagcattttcgtgcgtacctgctcaaggaaaatcgccacaacgattgccaaaaccgtaccgagtacgataaatgccagattatagcaaagtgtattgcggaagattacaaaggcgtcacttgtcttaaaaagataggtgaagttatccagacccacccacgggctatcaaaaacaccgactgtatagttgattttcttaaatgcaaaggtcaggccgaacatcggcagataattgttgatgataagataaagaagaccgggaatcatcaaaagatacagcgggagattgcgtgtaaagctgccttttttcttaattttcccttgtctattctgacttgtagaatttgacattttattacctcttgtctttccgtttgatacatgtctgaaaatgaaatagatatcggggaggaacaaaccgcatataagccttacggcgacgcttttattctgaaatagaaccgggtctgcgtacatatttctagtttatgcagcagacccagccttataattatatcattttatttcagaatcagcctgccagaaatgcatcgagctgttcctgttttgccgcaacaatctcatcgataccggcatcacgaagtccctgctggaactgtgcgagcgttgcatcgaaatcttcgacggcaccgccggataatgcattctcatactggttcacgacattcgtgcaagcggagaccgcatccgaaacgcctgtaaggtcgaactggcaaccaaaagccttggactgctgtgcattcttgttggctgcaagcatacgatcgtaataatctgcaggatattcaaacggaatggaaatcgtagagtttaatgccgtccaagaataaccaaggcaccagcctgtggtagaaatgtctttgccgtcaacgtatgtagccgtgttatcctcgagcacctgatagtgctgaccctcaataccgttgatcagaagattttcaacatcgggatcggtcgccatcaagtagataagagctgctgcagcttccggattcttcgtggccgggttgatgcattcataggcccccggcgtgatcgcgaccgcatcctcatagatctggagggaagcgatatcggtaccgaagttctgagaagaccagataccgttcatctcggcactgaagtgacttgcaaagcagccaaatgccttaccggacgggatgtaatcgatcggcgcatctgtgacattcagaatatccgccatgtagcagcccatctctttccactgcttgaagtagcctacaagctcctcatagccagcgctctcataataattcgtaaccgtggtatcctggccgtagttatccagaacaccaagcttgttgccaagagaatcgattcgggaatccccaatgctcggtgcgccattcatcggaccgataagcggtgtatccggatacttctcacggaccttgccgaaaagctcggtaagctccgcaaggtcaaccttatcgccgttcttgtagccgaattcctcggcaatgtcgcggcgaaggttgtagcaagttgtggaggcctgatccagcagacggccgataccgtaaagctcgccgttgacacgaccggattcatacactttttcaccaagagctgttttcacttcttccgcataaggctccataagtgtatcaagcgaaagggcctgaccattgttgacaattgtgctgtacggaacggaaatgcctgccatgaatacatcgagtgtatcatcaccgccggaaaggagaagattgagctgctgggcaacgttgccgatctccatcgtaataaactcaacgttgcagccgatcttttcgcgtgtaatctcgctgagcttttccgcaaccgcatctgcatccggcggcgtcgtgccacagacaaccatcagggaaatggttggaacttcgccgtctgtagaggctgtatcctcagtagaggcgctgttttcagatgtcgcgctgcttccagattgactgtctgcagaactgctcccgctgttcccacagccggatactgcagttgcaaggacgaacagcgccagtagaactgccaaaatctttttcgttgacattttgtacctccgttaaattttatttttccccgctcgcgcaatactcacgcaaacgtttgctttgtgctgtaatattatcacgttgtttatagtttgtcaacaaattttgtaccaaagttttcatcgtgtttttgtatatattgtgattttgcactatagcagcacatttaactttagaatttcaaagattttttagcagaagcaacattttattgtgtgtgcaaacggtttcacaaatgcattatttataatcatcaaagcaggtatatgacttcccctcgtttttccgataacgataaaacctcttttcagtccgcaaattctcagatctgtgagcaaggccggttatatttcttcttacatgactggaaaattcgtttcgcctcttggcggacacaaaaaaagacatcgatcctcaggtcgatgtctaaaatcacacgattttttgttttacgtatatgacgtgttcaatgcttatgctttcacaaaactcggacccgaggttttacggcgaataagggaaaccggaagaatagaacgctccgggacaatttgaccgtttatgcgttggatcagtatctgcaccgtaagcgcacccatttggcgtataggctgcgcgatcgtgctgatctcacaataagcggaaatatcaacaccgtcaaacccaatgaccgggatacgaccaaaagtgtcggcttcatccgcatcattcaatgtgttcatgatgcgcgctgcaagaacgtcgctggtcgcgaaaataccgtctgtttcagggaattgctttaaagctttgtaaacatcctcaccaaggttttttccaaacaggtcctctgcatcgatataatactccgaacaaggcgagccgttccttgcacaagcatcttgaaaccccttgtatcgcagagctgccggaagctgattcgatatgatcctgttgccgaatagaagcggtgacttacagccgcttgcgagcagcagctcttgtgccgcaagtacaccgcccttataattatcgcaggaaacagagggtacgtcttcaatcatgcgctcaatggtaacgatcggtacatccgtctgcatatacagagattcatccgtaatacggctgcaaaccaaaacgcctgcaacattgttcgcacacagcatcgtaaaaagctcgcgctctcgatttggatttccgccggatgtgcagaaaaaaagcttatacccggatttatagcaggcttcctcaatagcagctgtcaggatgccaaaaaaagcgtgatcaatatagggtacgatcaaaccgatcaagtgactggacttattgccaagcgaacgagccatctcattcggaaaataattgagttctttcattgccgcaaaaaccttatctcttgtttcccggctgatcgctccccgaccattcataacccgagagaccgttgtaatggatacaccgaccttctctgccacatccttgagtgttgccatatcaaaacctccagctactccatgccgtgcctattagaatttgaccgactaatgcaatatgtaatatataataatactatattatcatatacccggagtcatgtcaactttccctcatacgctttcacaagggctgcagctcattccatacctacacggcacaaaattgcgattaacggcgcaactgcatcccgatttttattggtattcaaacaaaaaaagcatcattcatgaaacagatattgagcaaaatcacgcagacacatgcgccagacattccactcgtgttcaccgggatacattttttctacatgcaccgagttttctgcaggcgcaagccccttttcttcaaacaacgcacgatccgcttcaaatcgctcgagagcaacaagatcttcgtctccgcaagcacggaaaaacactctaaaggactgtgtgaatttttcacggtcatctaacaattgaatataagaattttctgcatttgctttattgaatggaccgacaaatccgctaaatacgccagcatacccgaacatatccggatgcttcatggtcacgatgctagtctgcatggatcccatcgacagacccgccatggcacggctccatttatccgttcgcacacggtaatgcgattcgatgaacgggatacagtcctccaaaagaagtcgctcaatcctcgtctgatccaatacacgtacgccgttttcattcttctgcaccataccgttattcataaccacgatgcacggctccgcttttccggcagcaatcaggttatccataataaagttcacgcgcccctgatgtacccagcactgttcattttcaccgtgaccatgctgcagatacagcaccggatattcgctggaaatctctttcatataaccggctggcgtataaacgaggcagctcttcatcgttccggtcgctgcagaataataatattcctgcacgaccgaaccatgcggaacatctttgcacaggtaaaagtcttcatccggctgcggaatatccgcatagtttatgggtcttgaagcgccaaacccgataggcgccataggattgagcacctccgcgccgtctacacggaatacgaccgggcagaatccgccgcagccgccatctgcaaccgtgctccaaacgccgtcatcgcctttttccaatgtatagatcttacggtgtacttctgccgtaacgctttgtgcccccggcgccataaagttcaggcgcatttttccaccctttaacatcataatacccggcggaatcaatctgtcactttccggactcagtgatgttcctgctttattaccgagcggaagctgcggatcaaagctgaccgaggtatctgtgattgcacaattcaatgcagctgacggataaaagctttccttttcaaacataaaatgtagacctccctcattattcccacatgctttttaatttgtgaacttcaaaatctatcccaatacccggatctaacaagaccggaagtatcgaaatattggtcgggtccggtaccgtcgccaacgttaggttaaactttccgtcatctgcgtaaagttcaacggagcagcggtccgtcacaacgcgcagctcgaacgtatcgtctttcaacgcaagcttatatgctcccaccggcagcaaaaggcgttcgatcttcggatcatatacaatcagcacgccgcgcacggaaaacgcaatcagcttatccggcttcatactgaatttgaatgtcatatccatcgcttcaccgaggtattctcgcgggatacgttcaaattcctccaatccgcgtccgacaaacgaatagctgcattctctcaagactttcacctccgctgccggttttatcgtgatcctcggtccctgctctgttgaaacaagccgcagttcattcggtatactcaaacaacttgaaaacggcccctgagaaacgactgtctgaatccacgagatctggatcacgcgtccgttcggcaagttcgcgaaagtctgcgccgcatatccgcccgttgagcgcgcctccaggctgtatgctgaatcaatccgatgcgtgggaccttcaatcacgtccgtttcgggaacaaaatgacgcccctcgaaatgaccgatcatatagttatccgtagagccccaaagcacccattttctctgcgtcatatcgttgtcgatcggtaaattgaacagatccgggcattctgcgctcccccgtatcctgatcgtttctccctgttcccaatgcagcagatcatccgaatagaggaacatatagcggtcattgtccaaaaagatcaccatgacccagttttggttctgatcgtcccacacaaccttcggatcgcggttcatatatgcgatatgctgcacgatcgggttctgcgcgtatttttcaaagtgcatcccgccatctgtgctgactgccgcggcgatttcaaagtattttcccctgctccagcgcgatttgctgcccgcaggtgtatagaacagaaaaaccggcggtatcccgtcttttcccagtccggaggtattttgcagatctaccgcaccgcagccggaatacatacgccctgtttcatccggaagcagcgcatacggcagctcttgccagtgcataagatccgaacttaccatgtgcatccaatgcgtattgccaacaccaagaccgtacggattcagctgtgcaaaacaatgatacttaccgttcaaataaaacagaccgttcgggtcattcataaatccatgcatcggcgtaatatgcgcaaggggacgcatcggttccctgtaaagcgtatccgcatctttcagcgtatccgaaacctctaaaagctcgataagtgattcgtctccgcattcaaggcgcaattccaatgtttcacccgcataccgttccaaatacagacaggaccagcaacgcggtgaagcatccaagcatacttcatattcttccacaaggctcccgttttgataaatgctcaaatactgtatagactctgccggtatcgtccagcctttcacattcccaaccgggatcaacagatattttttgtctgccattattgttttttgccgcatagcagcccctttcatatcaaccatatttgtaccgattgcacgatttgcgcaattagtacgcaaacgctttccttgcttgtaatcttaacaatatcataccattttgtcaatatttaatctcaattttggaacccctgtcaaattatcccgtaaaggattatgcagttttaatacgaagctgtttataaactataaaaaggaaaggttccctaccgcaaaatatcattaaatcatgcagtattgttccgtctaagaattttgctattatcctatcttttcagcaggacaaagctcccctctgcagaattaaaatggcagcgaattgcgcgcggcgtaaacgcggccctgcatcttcacgggaatgtgggtgcggaacagcacgtctaagttggcgttcatcagcggaatgggcagccagccgagcaccgcgcccacgcaccacacgcagagcgcatcggtgctgagcaaaacgagcacgccgacggtgctgagcgccgagccgctttgctcatacgcccaaatgacgagcgcaaagcttgtcatagagctgccgagcgcggaaaacgtctgcgtagaccacaggcgcagaaatgggcctaatgccgtgcgcgcgggtttatcccaaagcttcggggaaaatttgaatgcagaaaactcttttgaaatttttgaaatgaaattgcatgagactttgctcttccttaacaaaaataaaaaattcgtgttaaaaatgcaaagtctgcgggcggctaggcgctccatgcggacccgcccggggtcagacttcgcatggagtttttacactgcaaagctgcatattttttccttctttctcaaaaattgccgtataataaggtcaattttaaaatagcatgaattaccgggtttatcaagttgcaaagtgtatttgcatagcggacaaattgcgtatatgctgtgaacaatttaagcatttaaagcgtaagcagcgcaataaactttacatttttttagataatacttgataaaacgcccttttcatgttattctgtatacaggaagagacgcggaaatatgtccgcgagataaaaacactttttacttgaaccgtccgttttataaggaggagaccttttatgatgctcaatgaaacctatacaaaaaatatacagccgagggacccggaaagaattcgttccgatatcgagaccccctgcgcaacggtttataaccagggcgtaacaccggttttgtatgataacgctgtgcaggcttcctccagacccggccgcgccgtggaatatctgccggaaaacaccattgcgctttccgtttccgagtgcgtgatgatgttcctcatccagctcgttccggttttgggacttatcatggctgccgtttggagcttctccccgaactccggcatcaataagcgcaccatttcccgtgctttgctcatcgtgcagtgcatcgtgcttgccgttgtgtgcgtcttttggtgcatcaactacggctttcatgggtaatatttgacaagtcaacacgccgccgacagtggattttgccgatcctctgccgacggcttttattttgcttgattttgcggggacgtttgttataattgtggaaaaggaggcgtttttatgcgcgtgtttcgtgtgctttggccactcatctcattgccgatgatgctctcgttctgttacatctataatgccacgcgctcgttcggcagcacgatgtggcgctcagccgcaaagtgcggcgcaacgttcgtagcggtcatcacggcggtgctcggcatcgtgttgtttaatcgcccggcgaacgcgtggctgctcgctttggcgcttttattctgctgcatcgcggattttgtcatcgagcgcgattttcgcttcggcgtgatctcgttcggactcgcgcaccttgtgcttatctggtatattgcacagctcggcgggtttcggtggggcacggtcgttgcggctttgattatttacggcatcattgcgctgattttccggcaatatctgcattcgcttggctctatgttgctcccgatggtgctgtatccgctcgtgctttcgttcatgacagctatggcgggcacgttgccgtttgctgtctcgacgcagtggatactgttcgcgttgggtgcagcggcgttctgcatttcggacttgttcgttgcgcgggatttcatctgcggcattacgggcacacagaaaaacggtgcgctgatcctatattacctcgccgtgtacgcgatggcgtcgatacagctttatttgtaaaactcttttgggggaatttaaatggaaccaattttgaaaagtatactggaaaataaaacggaaaactacctgctgccgtttttctggcagcacgacgggcacgacgcggagattcccgcacgcgtgcagaagatctatgagagcggctgccgcgcattttgtgtggaatcgcgcccgtatgaacacttctgcgaggacgcgtggtggaagacgatggacattattttggcggaagccgaaaagcgcggcatgcgcgtgtggattctcgatgataagcatttcccgacgggctacgcaaacggtattttagagcacgaagacctgaacctgcgtcgaaaattcctgcgggaatcgcatgtggacgtgatggggcccatggcggaagcgtccgtcttggtgccaatgcacacgccggaggaaaagctcgtttccgccgtgctgttccgccgcacgggcaaagatgaagagctgaccggcgaaccgattgagcttgacgtgcagccggaagataaattcgtatatttcagtgtacccgaggggctttaccgcgtatttttcgtgtttgagacgttcagcggcgaagaaaacaaaaagtactatatcgacatgctctcaaaagaatcggtgcacaagctcattgaagccgtgtacgagtcgcattacgaccactatgcgaagtattttggtaacacactcgcgggatttttctccgatgagccgggctttgacgcgccgcatttcggcatgacggggtacgacaccggcatttataatcgttcggttggccagcccggcgtgatgctgccgtggcgcgacgcggccgccgtgcacatggcaaaagacggcatcgacgagccgacgctctatctgccgattttgtggtatgcacatgacgagctgaccgcggaaattcgctttgcgtacatggacgccgtgacgttgctttggaaagagaatttctcctatcagctcggcgattggtgccgtgcgcacggtgtgcaatacattgggcatttgattgaagacatgaacgcgcacgcgcgtcttgggtgtagtgcgggacattacttccgcgggctcgacgggcaggatatgagtggcatagacattgtgctgcaccaggtaatgcccggcatggccgactacaaaacggcggcgctcgtctcgggcggcatggtggacggcgaattcttccactacgttttggggcagcttgcggcttcgcacgcgcggcaaaatccgaatatgaacggccgcgccatgtgcgaggtgttcggcgcatacggttgggcagaaggcgcgaacgtcatgaaatggttgatggacttcctgcttgtgcgcggcgtaaaccactttgtgccgcacgcatttgacgatttcttccccgaccgcgactgtccgccgcactttggcgcagacggcaacgacccgcagtttgcgggcttcacgcagctgatgcactacgtgaaccgcgcggcgcactatctgtacggcacagagatggaagcctccggcgcaattttataccacgcggaagcggagtggatggacaaatcaagcgccatgctgacgcaaaagcctgcaaaagcgtgctatgacgcgcagatttcctacgacatcgtgccgctcgattatctggagacggcggaaaagaacaacggacgctttggacgcgggtacaaatacctcatcgtgccggcgtgcagaaagctgccggagcgctttgcaaaaatctgcgaagcgctcaaaaacgcaggcgtgccggtattctttgtcgattacgcaccggactgcgtgaatatcagtgaaaacgagatcgtgccgcttcaaaagctttcagcgcacatcaaaggaagcggcctcgcgcacgaatataacgcaaaggagcacctgctgcgcattgcaaagttcacgcgcggcgaagcgacaagcttctttgtcttcaacgaagcgccgaacgcggtacaggagacgctttcgctgcccgtcagcggcaaatacatcgcggcggatctgttaaacggtgtctatacgcgtggcgaaacggcagacggcacagtcgggctcgcacttgaagcggggcaatcggtgatcctcattttcggcagcgctacggaagatgaatgggcaggctttccggaaaaatccgagggtctgcatatggcggagattgagacgctgtgggacattgacctgcgtgagacgggcaaggagacggaattcaagccgttccgtaaaaactcgaagctctttaacatcacgggcaaaaacggtgaaacggagttttccggcgaaatgcggtataagacaaagctcaacataaacgatacggcacacgtagagcttgaatttgaaaacgtcggcgtaacggcacggctgttcgtaaacggcaaggacatggggcagcgcatctgccgcccgtaccgctgggatattacggaagccgtaaaagcgggcgaaaacgacgtagaagtattcgtctgcaacacgcttgcacagcgtatgcaggatttcttttcgacgtatatgacactgcccgcgagcggcatcacgggaaaagtgcggctttttgtgcaataagttaaatttaaacgcccccgcattctcgttaacacacgagagtgcgggggtcattttttacaggcaatcgtgcacggacacacgccagtattccacttcaaaggtcggcgcaaagccgaaaaagcggtataaatttaaggcgggcgggttttcggaatcgacgtcgagctcgatgcctttgcccgcgtttttggcttcggtcagcgccgcgcgcataaggagtttgccgtagcccctgccgcgctcactggcttttaccgccacgccgcagagggacaacgtttcgtccgtttttttccccgcgaggtcaaacacgccgatgggctcaccgtttacatacagcacatacgccgtgcgattttcggcgaggagcatctcttttgcggcttcaaaatttttatatttgcgcagggaaacggacagatagtccgcgagcgtctcctccgtcacgcactttacggttatgttttccggcagtgggagaaccgccgactcgcgcgtcatgcgatattccgtgtggctgtggacggcgttcggaaagtgctttttgaggtacgcctttcccgtttcgctttgcggctcgaggtcaaacaaaaaatcaggcacgccgtgcacctgcatttcctttgcggcggcgtgcaaaagtgccgtgaattgcccgcaatttcgcgcggattgcttcgtgaacgccgttacctcggcctcctcctgcgtcggcagaaacagcgacaaaaatgcagtgagcgcatcgttttcacgaccgagataaaagcacggtacggtgcggtcaaagtgactttccgtttgcagccagaccgtattctttagattttcgccgctgtatacttcattttgcagcgcgagaatttctgcacgctccggctctgtaagtgcggcacagactttaacctctaaactcatttgcgcttaatcactctgccgaaatggtcaagctcgcgcggtttttccatgggcagctcaccgtagaccttgcgcgcgaggaagaagaccgccacggcgtacacaacgagcagcacctccaaaagatagacggaggtaagcacgttcgtctgatacagcgctgcgaggaagccaacaaccgagtgcagcaggatgctgacggggtacagccagaatttctgcgaacgcaccacgccgaacatcaaaacggaaagctcaatttgcagtgcgaacaccgcggcgcgctccacgcagttcatcacgccggcaagagggctgatggcattgatctccgcgatggtctcaaggacgatctggtactccgagttcacatactgcgcggcaaacgcctctgcgcccatgttattgaacgagatggacatcatgagcgtagagagcaccgtgaggcccagcaccatgatgcactcgagcccgccgaagccgatgccgaacgtaacagcgttttcgcggcccacgctgtccttcagcatcgttctatatacgaggaagcgtgcggtctcctccagaatgccggccgaaagaccgccgtacacggcgtaaagccacgggtgaccgagcaggaacgcggaaacggcggagctgcccgtgccgagtacagcggcattgatgagctgctccagcaccatgccgaacacaaagtaggctgccgcgccgatccacgccgggcggagctctgtgccctccttctttttccagatgacaagggcaaggatgggcagcgcaagcgaaaacagcagctctgctgcaaacgtgatgatgatgctgacagatatggtatcggccatagtggtatctcctttttgcgaaatggatttcttataaatgaaaacgccgaaccgccggaaggcaaaaaaatcctccggcggtgttaatttacgggatagaatcagcggaacagcgtgcacacgccgctttcgcggtaatagcggatgcgcttttcaatttcctctttcgggcacttgaaataatccgcaaggcactgtatgcacaaaaagtcctccgcgccgcggtagacgagcttgcagtaaatggcgatgtcgtcatcgtggagcggtgcgccgcaggtgcggcaggttttgtagtttgccattatttcagcttcacgggctttgcaatgaacaccatggtgtcatgcggctccacctgcgccacgtagcgctcggcgaacttgccctcatcctgctttgtatagcagttgtagaaggagaggccgatgttctccgcataagagatgcccatatcccagaactgcagggacatttcgctctttttatcgccgaagtttacgaagcagatagcaagagaaccgtcggaaaggggctttacgagcgccatgacgttctccgggttgttccactggcggatgcagtacggcgcgcggcactcgatatcctgattgatgcggatgaggtcttcgttgccgagcgtttcaagcgtcacatcggtcatattgcgcacgtcgcagccaatcatcagcggggagcccataatggcccacagtgcgaagtgcgagcggtattcgaggtcggagcaggagccgatgttgccgatgaactcgttgttgctggagccgtgcataccgacgatgagcatgtcaatgtcgttgtggcagtacgggccgctgaacgccgtcttatcgagctgagagaggaacaggttctttacggattcccagttatcctgaatatcgcccgtagagcggaacagctgtgcgccggagcttctgatccagctgtgcacgtcttcgttgccccagttgcaggcggaaagcacaatgtctctgccgcagttgcgcagcgcaagggacatgcgcttgtagagcacttcgccgtccatgtgcttcggtttgtagcagttgtcgtacttaaggtaatcgacaccccaggaagcaaacgtctcggcgtctacgaactcatgctcaaagctgcccgggtagcccgcgcaggtgtgcgtgccgcagcaggagtacatgccaaacttgaggcccttcgagtgcacatagtccgccacagccctcatgccgtgcgggaacttctccggatccggcacaaggcggccgttttcgtcgcgctgcttgagactccagcaatcgtcgatgacgacgtactcatagcctttatctttaaggccgcttgcgcacagagcgtctgctgcgccgcacacgaggtcttcgttgatgttccatgtaaaggtgttccatgaattccaacccattggcggagtcatggcaagatatttgttctgcatacattctttcctttcgctctaaaccaaactgtcttactgcacttcgttcagctcacccacagcatctttcaaaagctcgatgcacttttccgcagaggattttgcaaacgtctcaaaatcgacgctgccctcgtcgttcgcgttatcggagatggcacgcagaccgcagaacggcgttttattcaccgcgcacacctgtgccacagcgccggtctccatctcgcaggagattgcgccgaactcggctttcagctgcaaacagaaggcgggatccgccacaaaacggtcgccggtcgcaatgacgcccgtgtgcacgccgttgtagatcttctcggcgtacttttcgagcaccgcattgtgcttcgcgctcgtcggcagctgcacaacgccctcactgccgatcattacgaagcctttcggctcgccgatggcggtggtgtcgtaatcgtactgcacggtgtgggacgcaacgaccatattgccgatcttcacgccttcgccgatgccgcccgcaacgcccgtgttgatgacgacggacggcgcgtagttgaggatcatcgccgccgtgcacatggccgcgttcactttgcccacgccgcatttcgcggcgacaacgtccgtgccgttcagcttgcccgtgtggaacgtaacgccgcacagcgtttccgttttatggtctgtcagcgccgcggtgatgcccgcgacctcaatctccatcgctccgataataccgatcatgtaagaaatcctctctttcggggctgctttcaaagcgcccccattataccgcataaagcccacgcggtcgattttcatttgttgcgcgttcctattattttgttgtttatttgttgcttttacttaaaacgcttgccgagcttttccttcataaaggtgcggaacgcatcggcgtctccctgcttaaagccgtccttgcggataaagtacgtattgccctcgccaaaatacatatagaaatattcattcgtttcatacatgcggctgatctggaaatacgggtgcaggttagaagcctgtaaacccgtgatgcggaagtcgccatcgtagaaatagtacgcggcgcggcggttacgcagcttaccgtaggagcgcataagcacctttgctgtgttggtggaagccgtcgcaagcttataaaggctgtaaatcgcaaagccgataagcagtagcatgacccaccagttgctgtcgaaattgccgagctgccacacaacgtacagcgcgatgacgcttaaaatcacggtgaacaccggcatgaaaatttgcaagtgatacgcctgatagttcgcgaacgtcttgattgccgcgtcgtcgtggtcggtctcgtttacaaaacgcaacgcgcccgtaccgacggattcgtcgtcctgcttcgagcggcggtattccgcaaggcggtccgccgtctcttttctaagctgcttttcacgcttgttgcggctgtgcgtcgtcacaaagtaaacgatgagcagcacaatgagcacacccactgcgccgagcgtcacagcgctctgtctgctcaaaccgttttcaatcgtaggtgcttccgcaaaggcagagatgacggcggaatcgaccacggcgcgcatgaatgcgtccgtctcctccgagatttgtttcgtatcgccgaagaggtcaaacgaaacaatcttgccgtcgtacagcgtaccatagaggcgctcgtacacgggtccctcttccttgatattctccgcacagatgtcgatcataaagaacggaatctgtgcgtggtcgtaccacgtgatggtgccggtcgtgctgccgtccatggaagacggctccatgtatttcaaaaaatccttcttgcccttttcgtccagattattgaggttaaaaacggagttcgcgtaatcggaagatttcgccgctacggctatggtatcgccgtttgccgcaataatctccgccgtggtcccgtttttctgcatttccttgatcttctcgctcgcgtccaaaatgcctgccttgctccacgcggcatcgcccgccggggtatcgacggaaagcaccgtcgcgccctcggggattgtgacggtcatgttcgtgtccgggatcgtgtatgtgttcgatgatgcgctgtccgccaaagccggcagacaaaaaacaactgccagcatgaaaactgccagcagacagcctataaagcgcatgctttttctttgatttgtcatgtatgcgtcctttctgcgtacacggtgcgtacgcatcacagtaattattgtcattgtaccacactttcacgaaaatttataccgttttttgcgttttttcgcgcgaatttacaaattgtccaaaaaggcgtttgacaggcagctgaagcggcggtagaatggaaacacaaccatcggaaaattttgaaaggacagtcactatgaaaatcgccgtgatcacaggcgcttcctcaggacttggcatcgagtttttacgcgccgctgtcaccctttgcccggagatcgacacttattggctcatcgctcgccgcgaagaccgcttggaagcattaaagctgcagttcccggaaaaaaatctgcgccccatcgcgctcgacctcaccgactccgccgcattaaaacaatttaacgctttgcttgaacgcgaaaagccggaaatttcactgctcatcaataacgcgggctttggcaagctgtgcgattttgcgacaagcgacgtcgaaagccagaccgcgatgatcgatttgaactgccgcgcactgaccgccgtcacgcggtacagcctgccgtatatgaaaacgggcgggcttatcctgaacatctcgtccatcgcgtcgtttgcgcccacgccgcgcatggcagtgtattgctccacaaaggcgtacgtgcaaagcttctcccgcgcgctgcgcgaggaattaaagcccaaaaagatcaacgtccttgccgtgtgccccggcccgatgattacggagttctggcaggttgccgaccgccccacgcataaaagccgcacgctcgacatgctgccgcaccagtcgcccgcaaaaatggcaacctgcgccctgaaagccggattaaagggcaaaagcgcctgcaccatgggcggattttataagttctaccgcttcttagcgcatatcctgccaaaatcgcttttggtgaagtggacgaagtgctgagcatacctctttgtcggttaaaattcagctgaactccgcgaacgctaaaacacttttccgtctttatagattttttcggcatagaaaaggccctctgctgcaaagtaagaaccgcagcagagggcttccgttttattcagcttcaagcacaattacagcaggataacgcccttttcggcacagacgcggcgggtctcctcgtcccagagggaagcttgcacctcgccgatatgtactttgccgagcagaagcatacaaaggcgcgactgcccgatgccgccgccgatggtgagcggcagctcgccgtttaaaagcattttgtggaacggcagctccgcgcgcgcttcgcagcccgcaattttaagctgcgccgcaagcgaattttcgtccacgcggatgcccatgctgctgatttccatcgccatgccaagcggctcgtgccagaacagcaggtcgccgttcatgctccagtcatcgtagtccggcgcgcggccgtcgtgcggcttgccgcttttgagcacgccgccgatctgctcgatgaataccgtgcggtgctcgcgcacgatgacgttctcgcgctgcttcggggtgaggtcagggtagcgatcctcaagctcctgcgccgtgatgaaatacacgtcgcggcaaagctcggtggaaaggccggagaactgccactttaattcgtccagcgtgccgcagatggcgctgacgatgcggcgcaccgtgtcttccaggtacgccatgttgcgcgtgtcacggtcgatgaccttctcccagtcccactggtccacatagatggagtgaagattgtcgagctcctcgtcgcggcgaatggcgttcatgtccgccacaaggccgttgcccacgtaaaagccgtaatcatgcaacgcaaggcgcttccactttgcaagggaatgcaccacctgcgcgttgccgccgactgccggaatgtcaaactcaaccgggcgctccacaccgtttaagtcgtcattcagacccgtggaggggtcgacgaacagcggcgcggtgacgcgctttaaatgcagcgccgcgcaaattttgacgaggaccacgttcttaatcaaaccgattgccttctgcgtctcgtaaaggccaaggctcggcgtgtaattttcgggaatcttcaccatctataaaaccccatttcaaaacaatctttcccctattgtagcgcacggaaaaagatttgtaaagatttttcgcagcctgcagcaacggtagttaaaagttttgctctggctttctcaaaatcttgtcagattccaaaggtgaagccttttagaaaggactcgcttccatccccgcaacctcccggttatacgccgccatacagcggatgacatatacccgcgcggctatgctgcacaggctgcccgggatgaggatccacgcgttcagcacgaagaacgcaatcatcgcggcgacatcacagaaaatcgaaaatccctgcaaaacgagcgcgtaccccggcagctttttcggcagcacacccacctgtatcgcgcgctgcaggctcgtccacacgccgagcattttaatgctgtacaaaagcagcaggacactcaacaccaaaccaatcacgaaagcaatacccattatcaaaatagcgatattgtccggcaagccggtgtaatttgtcacgttcggggcgccactcgatgcgaggagcaccaaaagaccgatgagcagcaacatcccgcaaaaaataccgcacccgacgatctggagaatttccgtcactttaaacagcgtgacgcccgctgtgctcatgaacggcgtgtccgtcttcttcgcggaggcgtacagcagccaaagcccgataagcaccagaatattttgaacgggcacaatgtttacgttaaactctacgttgaaattcgtgcctatgggcgtgcgttccagcagatacgcttgattttgcagcaccgtgaacacctcaatcaccgatgagaccgccgacacgaccatctgcaccgtaaaaagcagcgcgcacatgaaaaacagctttgacgacgcaaaccgttttaacatcccgtgtaccggcgtgaccggacgcacgggcggctgcgcgtaatactgcggcggcgcctgaaaattctgcggcggctgcgtgttgaaattcccgttctgcgccccgcaaatgcaaggcgaaccgtcctccgggagctttctcccacaattcgtgcaatacataaccgaacctccttttaaatacgtctaaactttcgctttatcggcgattttattaaatttaacggtgcaggcggcaaataaagcgctcaacgccgctttgcatatgagcggtaaaaacacccataacttgccgatatcgtcgattttaaaagtcggaacccataaccacgaccacaacgagcatcaccggcacgatcagcttcgcgcaaagtaaatacatacaagtcgcaaagcgcgggatcgtccgcagcgcgccgtccccgcgcacggctttttccgagttgtgcagcgaccgcaccatcataaaacagcaaacggctgataacgcacttacgatgccgccgataaacataatgccgtatcctaaatatccgaaaaggtaatcgactatatctgcggtcgggctcggccctgtggtgatctcatatacgataaattcgacttcgataccaaacagcgcagctgccgtcacagcaaatgctaccgtgcggcaaagcaaggcgactttcatcgtcttaaaacccgcaccgcaaagcttccgttttttggcgccaatatacagaagccaaaagactgccgccgttactgtgccgaatatacccgaaagcaccgccgacaatacaggatacgcaggtatccccgtgtaaccttttcccgtaaagattatctgaaacgcccacgaagtaaacgtcacggcaccgccgtatacatcgccgaatccgttcataccgctgacgatcaccgaaataacggcgttcagtgtgaccaataccgcacacatgaagaacagcggcgaagaaagcatgtcccgcaaaatttcctccgcgcgcttttcctgctgctctgccggctccgctttggtgatatatgttgtattttccaccatactttcatgtcccctaaaagcaaaacccgcttccgcgcagcggaactacaccgtcccgccgcggccgggagcgggtcgcgttcacttattttgttttatcgagccatgcctgcgtttttcagcatcttattaaaccgcagaacaagcagaccataaagcacgttgagcgcaacgctcgtcaagccgagcggaacacggatccagccgtacagtaccgcatcgccgaaaacggagaagaacgataccgccgccgaaataaagcagatgaccgccacaaacatggaagccttattcggaaccatgcccgtcagcatcgcgttcttcgcgctgttcagcatctttatgacctttgcttcgtaaatgatctcaaaaatgagcacgacaaagccgatgatgcaggccgcaatgagtatgatgaagaaaccgctcatcatctcatccatgtagccgtagtcattgtcggcaagggcaacaccgaagatcacggcgagaacaacgcacagcacctccacaaggctcaacacaacaagactgatgatgctgaacaccttcatgatggtgaggccggccgtttttgccgccggaacactcgggtttttcgcagatatgtacgtgatccagtacgcggcagccattaagccgcctgtaataagcataccgatgaccgtaccgaccgtggtgccgctctgcgcatccgaaagcgcactgtacagatcgcccggcgaaatgataaactgcatttcatacggcaggttgctgtaaatctgatttacaatatacgccggatcctgcgggaacaggcttgcgatgatctgaaacagcaaattcgccgaaaagaggatcgctgtaatgaggaacagcggagacgcgaaaaagcttttcagcacaccgtgcacgggtgtaatcggtcgctgcaccgggtattgcaccggcggctgcgcgtaatactgcggcggcatctgaaaattctgcgtgggtgcgccgtagttttgctgcggctgcaccggctgtgtgtacgtctgctgctcgggctgtgcgggctgccgccggcaaacgcacggcgagccgtcttcgggtagctttcttccgcaatttgtgcaatacatattttctttcctttctgttcttccctaattctatcctcatgccccgccgtcaaggccgcacggcaaaggcaaaagcatcagtggtagaccgcgacaatctcgaggttctcatcgagcacaacaaggtctgcgcgcttgccgggtgcaaggctgccgatctcgttttccatgccgatttccttcgccggggtcagcgtcatggcgcgcacggcagtctccagcggaatgccccaggaaacgaggttcttgagttcctcgtgcaggtttgtaacagagcctgcaatggtgccgtccggcaatgtcgccttgccgtcctttacggtgaccatattcacacccagcatgccttggccgccgtcttccacgccgctcaaacgcatcgcgtcgctgatgacgcacacgcgctctggcatgagcttaaacgtcgtgcgcaccacagccgggtgaatgtggatgccgtcacagatgagctcaccgcagacgttttcgttgtcgaacaccgcgcccacgacacccggtgcacggtgtgcaaggccggacatcgcgttatacaggtgcgtcgcatgggttacgccctttttgaacgcgtccaccgcgccgtcgtaatccgttgcggtgtgcgcaatggaaacggtgcagagcttcgaggctttctctacaaaatcgccgcgcacgtcgcactcgggcgcaatgtccacaagcttgatgatgccgccgcaggaatcgtaatacttcttaaacacatcgtaatccggcgcctgaatgaactcgtcgccttgcgcgccctttttcttcggcgagatgaacgggccctcaaggttcacgccgacaatcttcgcgccttccttgtcgtccatgcaggagcgaatcgtctcaagcgctttcaagatctccgcatcggaaacggtcatcgtggtcgggcagaaggacgtgacacccttcgtcagcaggaacttcgccatattgcgcagaccctctgcgtcgccgtcgctggaatctgcacccgcgccgccgtgcacgtgaacgtccacaaagcccggcacaatggtgtagcccgcgcagtccacaacgaggtcttcctctttgtacggcaaagaatcctcaaggcgcacgatcttgccgtcttcgatctcgatatccgccttgcgcaggcagaatttatcgtccagtacgtttgcgttgatcagaaacatgttaaaaactcctctccgctgcggcaaaaccgcagttttcttttcaatacatttatacgtttacagcaggctcagcaaaacgagcagcgtcacgcccggcacgccaagcacagcggataccgccacgctgagccggctgacgggaatatacactccggtgtacggcgccgtaaaatacaaaaccgccagcgccagaacgcccagcattgccgagccgatgaaccttttgattccccgcatacgctctcccccatttttatcctgtcggaaaagcttatgatgcaggggaatttttcataccttaaatgtcgagcttctctttatccggcacgaagtctaccttgccggtcgcaacgtaggcggaagccacgataatcggcagcggcgtgccgatggtcaattcgcgcttcggactgcgctgtgtgataaggccgtcgtacacaaaatcctcgccctcgaacgcgtcgagcgaaacaaagccctctacgctgttttcgaggcgcacaaacacaccgcgcatcgtcacaccgctcacggtgccttcaaagtgctcgccgatgtgctgactcatgtactctgccatgtagcagtcctcggcgtcacgctcggcgatgagcgcgcgaatttcattgcgggaggattccgtcgcagaggtctcgcagaactgcgcgtagcggcggcgcacctcttctgccggcatgccttccacaaatgcggaaagcacgcggtgaatggacgtatccgggtaacggcggatcggcgaagtgtagtggctgtaatcggaaagcgcgaggccgaagtggccggtctcctccgtcgaatatctcgctttttccatcgtgcgcagcaaacgctgagaaacaagcgtctcgcacggcaggccgcgcacgcggtcgaggatcgcggcgaaatcctgcgtttcggggttcggctttacgatctccttgcacggaacgcccacgagctgcaacagcgtcacaagctcctctacgcgcttcgggtccggggtgccgtgcacacggtagaggaacggcaatttatggtcgagcgagaatttcgccgccgcaatgttcgccgtcaccatcatctgctcgatgagctgctccgcttcgccggaaacgcgcggcatgatgtcgatacaaatgccgttttcatcaagaatgaatttcgattcgccgctgtccagctccatggtgccgcgggctgcggagttcgccttcaaaatatcggcaagctccttcgccgacatcaaggactccatgacgggcgcgtatttgttcaaaatctcctccgatgccgtgccgtccagaatttcgttgacctcgctgtacacaccgcgcaccttggaattgatgatcgtctttttaaaatcgtactttgtgatgtggccctctttgtcgagctcgataagcgcggagaaagccagcttgtccgtgcccgcgttcagggagcacgcgccgtttgaaagcacctccggcagcatcggaatcacgcggtcggcaaaatacacagacgtgccgcggttgatagcctcttcatcgatggcagagccctctttcacatagtgggaaacgtccgcaatatgcacgcccagcgtgtaaccgaagtccgtgcgcttcacggagatggcgtcgtcgaggtcttttgcgtccttgctgtcgatggtgaagatcggctcgccgcgcaggtcaaggcgctttgcgtattcttcgtcgctgatgggctcgttgccgacgcgctcggcttcgtcgagcacttcctgcgggaaaacatgcggaatgccgtactgctctacaatggcatcggcgcagacacgcgccgtgcggccgctgccgaagaccttcttcacgcttgcatatgcccagtcaccgcggtaatcctgctccaaagatgccatgaccttgtcgccgtttttcgcgccgtttaaatcgcgctcgcgcatacgtaaattatagcgaatggcattgtccgggatgaactcaatgccctcatcggtgatgctcaccgtgccggtcgtctgcgcaggcttgtgctctacgatgcggcgcacacggccggaggggccgcggtcgtccttgcgaatgtcgccgacgatgatcctgtcgccgacgagcgcaccctgcaaagcgctgccgtgaataaaaatgtcgtcaccgccgccatcggggcgcgcaaagccgaagttcttcgagagcgaaacgagcgtcgcttccacgtcttcgccgaccggaataagcttcgcgttgtgctcgcggtcaagtaaaatcatgcggcggtcttttaaagaacgcagtgcatcgtaaaaagcaagcttgtcgagcacacctgtctttttcaaaagctggcgtgcgctccagtcgtgaatttcctcgctgcgcatggtcgccaaaatcgtctcttccatgcggttcaggggcgtatcgcgaatgtcgcggcggcggtcggaacgaccgtttctaccctgaaagcccttgtttctgtcatttcccttgttatactgtttcattatacctatccaatcttccacaatcacgccccgcccggtccaaggcgaagcggcgccgagtgcgcaaatttcttgttttgttgatctttctcgccgagctactgttatgcacagtgccgagacaaataaatttttccgagctctgcggagctcgaccaaaggttccacctttggaatctgataaactttctgaagaaagtttaatcaatgacttttgcgtccgctttcacgtcagcttgtgcttacttcagtgctttcacttcttctctgtaaatatcaccgcgcacggcaaagctcttgtacatatcaaagcccgttgcggcggggcacagagacaccacgtcacccggctctgcgctttctcttgcaaggcgcacggcatctttcatgttgtttgcgtgcagaatcaccggcgcgccgtccttgtagttttcggcaccgcgcaccgcagcttcaatcttccccgcggccggcgttttaaagccctcaagcggtttttcgggcgcgagcagcacgagtgtcttcaccttgtcacaaatgaccttgcccagctcgtcaaacggcacctttttatccgcaccgcccgcaatcataacgatcttgaaatcatacagcgaaagcgtgccgatcattgcgcgggacggactcgttgcgatggagtcgttataccatctcacgccgtccagctcgcgcacgaactccatgcggtgctcgacgccgttgaattctttcgcgacagtcctgataacctctttcgagacatcgccccacacggcagaaatcgccgcaaggtagttttcaacgttgtgcttgccgggaatgcgaatgtcgctttcctccataatatattcgtcgccgaagtagattttgccgtccacgctgcaccacgctccgttcgtcttctctctgcgggagaacatgtacgtcatgccgcgcgtgtcagcggcacaggccgccgtcagggcgttatccgcgttcaaaaccgtgcggccgaacgcattctggtgcaaaagtacgttcttcttcgcgttcacgtactcgtccatatccttgtgcacgtcgaggtggttcggcgacagattcgtgatgaccgcgacattcgggctgcggcgcatggagataagctggaagctcgaaagctccaccaccgccacatcctcgggctttacatcacggatctccggcagaagcggacggccgatgttgccgccgaggtgcacagtcttgcccgccgctttcagcatttcggcaatgacggacgttgtggtcgtcttgccgtcgctgcccgtcacggcgtaaattttgcacggacacaggtcgaaaaagacttccatttcgctcgtcacggcaacaccgtttgcacgggccttttgcagctcgggcagcagatacggcacgccgggcgcgcggaacagcatgtcttcgtcgatactttcaaggtagccttcgccgcagatgagctttgcgccgagctttttcagcgcttcgccgtcttcgcccagcgccgcttcgctgcgcttatcgcgcaccgaaacggctgcaccgtgggctttaaactgctcaatgagcggcaggttggagcgccccacgccgacaaacgtgatgcgcttgccggaaagagacgcgtaaaattcgtttgctgtcataattcggaactttctcctttattttaaaaaggtgcggtaatcctccagattcttgcggagcaattcgggggtgtttaaggtatacggacatttcttcatgcactggccgcagtgcttgcagttttcaatcagctccattttcgcctgccactcgggcgtcagccatgcggcggacggcgcgcggcgcagcataagcgacatgcgcgcgcactgattgatctcaataccggcgggacagggcatgcagtagccgcagccgcggcagaaatcgcccgcgagggactcgtgctctttttcgatgaacgccgcaagctcgtccgtcatcaccggcgggttatcattgtaggaaagaaactcgtcaagctctttctcgcgctgtacaccccaaatgggcaacgtgttctcatactgcgcaaggtacgcatacgccgcatcgctgcgcgtgatgagaccgccggaaagcgccttcatgcagatgaaaccgacgttcttctccttacataggttcacgagctcaatgtccttttcgctcgcaaggtagcagaatgggaactgcagcgtttcatataagccggattccacggcttcgcgcgccacatgcagacggtgattcgtgatgccgatgtgacggatcttgccctgtgctttcgcttccagcatcgcctcatacaggccggtgccgtcgccgggcttcgggcagaagggcggcgtgtggaactggtaaatatccacgtggtcggtcttcagcatggaaaggctcgtctcgaggtctttccaaaagccttcaacggttgtagaagccgttttcgtcgcgatgatgatgtcgtcgcgtacatcggcgagcgcctgaccgatcttatattcgctgtctgaatacgcgcgtgcggtgtcgaaaaagcggatgccgttatcgtatgctttgcgcagcagcttgcccgcttcttcaacggaaatgcgctgaatgggcagcgcgccgaagccgttgcgattgaccgtgatgccggtattgccgagtgtcactgttttcatagttttcccgtcctttcaaaatatacatacccgaaaatttcctttgggctttattccgtgtccgccgtcatttcctgatagcttttatataagtcaaagtaaatgccctttttcttcataagcgcctgatgcgtgccggcttcttcaatgcccttatccgtcagcaccagaattttcgtcgcgttcttgatggtcgttaaacggtgcgcaatcgtgaacgtcgttctgcccttcgcgagcttttcaagcgacgcctgcacgatacgctcgctttcgttatcgagcgcactcgtcgcttcgtctaaaatcaaaatcggcgggttctttaaaaacgcacgcgcaatggaaatgcgttgcttctggccgccggaaagcttcacgccgcgctcgccgacgtatgtatcgtagccatttgaaagcccctcgataaattcatgcgcgcccgccattttggaggctgcaatgacttcttctttcgacgcgcccggcttgccgtactgaatgttctcaaacaccgagccggagaacaggtacacgtcctgctgcacaaagccgatgcggtcgcgcagggatttcagcgtcactgtacggatgtccttgccgtcgatgcggatggagccggcagtcgtatcgtaaaaacgcggaatgaggttgcacagcgtcgttttgccgccgcccgaggggccgacaagcgcgatgttctcgcccgcctttacgtcgaggtcgatgtcagaaagcacctcggtgccgtcatcgttatacttgaagcttacgtggtcgaacgtcacgtcgcccttgacaatgccgatgtccttagcgtccggcgcgtcgctgatctcgatgggcgcgtccatgacctgaaagaagcgctccacgccgctcatgccgctttggaactgctccgtaaactgcacgatgcggtgaatggaattgatgagcgttgtgatatacaaaaggtatgccacaagctgcgaggggtcgatggcgccgttcatcatgaagatagcgcccgcaatgacgaccacgatatacatgagaccgtcaaagaatttattggaggcttcaaagccgcccatatacatgtagcgcagacgcttgatgttgtaaaagcgctggttgccctcttcaaacttcttttcttcaagcggctcgttcgcgaaggatttcaccacgcgcacgccaagcaggctgtcttccacctgcgcattgatctcgccgagttgctggcgctggctgcggaattgcgcctgcattctcttattgaagaacatggcggccgccagcataaacggcagcaccgcaaaaataatcaacgtcagcggcacactcatcgtgcacaaaatcacaaatgcgccgatgatcttgatgcccgcaatgaaaaattcctccgggcagtgatgcgcaaactccgtgatgtcaaacaggtcagtcgtgatgcgggacatgagctgaccgatcttcgtgttgtcaaaatacgagaacgagagcttctgcaggtgtgcgaacatgtcgcggcgcatgtcggtctcgatctttgtgcccatgatgtggccgatagacgccatgaagaacgtcgcgcccacgtcgacgagctttaagaaaatgtacagccctccgatgcgcagaatataactgagcgtcaaagacgccaggtcattgatgccgcggtccgtgatctgctgcacgatgattggcagcgccagctcgcatacggtcgtcagcgccgcgcagaacaggtcgaaaatgagaatccacagatactttttaaagtacggcgcaaaacggcgtataagaccctttttgcccttatttgtcacagttgcttccacaatacccatcctttctttcgtcggcgcaaaaccgttttccgcaccgcgaaattccccaaaaacttataattttattttatcacaggcacatggcctttacaagacaggaagttacttcaaatgcagtttatccgccagtttttcacccttcggcagctgcacgatctcctcgcgcgtgatggctttggtaaacaccgccgccacgaggtaaacgaggattgcaagtagaataaccggaatgaccgcgaacttctcactcataaagcgcgtgagcagcagatatacggggtacgagaccgcgcccataatgacagaagcaaggagcggacgaatgcccatgcgcaccacgctcggaatttccggcagcatacggtgcagcgcgataaggttcagaataatcataacaagatacgaaacgaacgtaccgacagcagagcccatggcgttgatctccgggataccgcacagcacatacacaacgccgatgcgtaccaccgtaccgacgatcatattgatgaccggcacgtataccttgccgaccgcctgaatcatcgcattcgtagtgtaaagcaagctcgccgtgatgaccgccggcgccataacggcgagcagcggagcggtatttgccgcaaactctgggcggctgtaaagcaacagagagcaaatgggttttgcaaaaatgcacaagcccgcggcagacgggatggctaccatgagcgtcatgcgcagggagagcatggaaatacggttgatttcgcgcttttctttttttgcgatcgcaccggaaagcatcggcagcacgatggtagagatgggcacgatgacggcgttcggcaggtcgaaatacttgcgcgccgtgccgagccagcccttcatagcgatggcggagttcgcgtccacaccggcagcgccctgcaaacggtacatcatcacggaggaatccacaatgtcgagcgcgctcaaaaacgcagagccgatgatgaccggcaccgcaaaggtcaggatagatttcaaaatttcaccaacactcgaaaccttcggctcaaaaggtgaatagcgcgtatcgcgcgatttgcggaagtagtacagaagaatgtacaaaactgcgaagaacgagccgatggaaacaccgaggatcgcgcctgccgcgccgagctctggcaagccggtggtcttcaggaaatacagtgccagcgcaataccgatgaacagtttaatgagcgactccaaaacctgcgagaccgccgtcggcgtcatgttggaacgcccttggaaatagccgcgcaaacacgacgaaacggacatgaaaaagcacatcggtgccaaggctgcaatggcgtacatggaacggtcattttggttcatgagcatcgcgaactgacgggaaaacaccgccatgacgatgcagccgacaagaccgatgccggagaacagtgtgaatgccacgcggaaaattttatccgcttcgcgcttgcggttctgtgcatacgctacgctgacaaggcgcgaaatagcgaccggtgtgccggaagatgccaaaacactgaaaaatacaaaaatgtcataagccgtgttgaaatgccccatgccctcatcatcgaggaaattcgcaagtggaatagagaaaaatatattgatgaatttgacgataaacgtcgctgccgtcaaaattgcggtaccttttaaaaagctctgtcctttctgttccgtcttctgagacaaattgaaatcactcctatatcaaaatcgtaaattgccgcattgaaacgcatttaggaagcctgaacagcacacaaaatacgtacaaaatagtataccatactttccccctgtttcgcaaggaaacgggcttaaaatgtgcgcgatgaaagcaaagatcccctgtgcaaaacgcacagaggatccaaaatcacccgatcagcattctgccctccggcagaacggaaccgcttttctttttgcgcattaaaatcgccacgccgaatgagataggacctacgcggccgatgaacatcgtcagcgtcaaggcaagctttgcaagcggatgcagcgtcggggtcaggcttgcgctgaggccgaccgtcgcaaaggcggaaacggcttcgatcatcgcatccaatatggaaacaccgtggtgcagcgctaaaatgagactcacgttcaaaacggagaccacaagggcgaacgccacgaccgtaagggacttgttcaccataccggggtcaaaacggtggcgtaggaacgtagtggtgtcttcgccgcaaagagtggatttcaccgccgcaaacagcaccacaagcgtcgtcaccttaatgccgcccgccgtggagcccgggcagccaccgatgaacatcaagaacgacgtgaggagctttgcaccatccgtttcctgcttaatgctgacggaagcaaaacccgccgtgcgcgtgttgaccgactgaaaaaacgccgcgttcagcttttcaaagaagttcaaatcacggtatgtattgttgtactcaaggataaacagcatcaccgtaccgaaaaccagaagcgtcaaagatgcacgcaggcagacctgcgcgtgaaagctcagcttttccacgtgctgccggtgcaggcgcgtcgagattttcttgcggtaaatatcctgaaacaccacaaagcccgtggagccgatgatgataagcgtggaaatcgtcagcgtgacgagcgggtcgccgttaaaggccgataagctcgaattaccggggatgaagcttaaaatatcgaagccggcgttgcagaacgccgagacggagacgaacaccgaggcccatacgccgagcccgccatagagcggcacgaagcgagccatgagcagaagcgcgccgagagcttccaccgcaaacgtaaacgcaaccacgatgcgcagcagcgagatgacatccaaattgctgccgccggcgctttcgcgggcgagtacaaggtggcgaatgccgatgcggcggcggacgagcagcgtgagacccgttgcaaacgcggcaagaccgagaccgccgcactgaatgagcacaagcagaacgccctgcccgaaatacgaccagtgtataaacgtgtcatacacggaaaggcccgtgacacacgcggcggaggtcgccgtgaaaagcgcgtccacagggtttgtgaaccgcccgcttttcgccgagatcggcagcgtgagcaacacggtgccgataaaaataaggatcacaaagctgacgacgaacatgcgcgtgggtgacgtacgctttactattttttgtaatctgctcgttttcataaactccgaccgactttctccgggcgcgcccggaacagatttatgccaacatgagttcgctgatctttgtgcggcgcagcgccatcatcagcggcacaccgagcacatagcagacgatgagctcgccgataccgaccgaaacggcacccgcgatgaagcctgcaagggagagattgccgaaagcaaacgtgccgttatccgcaaggcaagccacttcaaagccgacgatgagggcgttgaaaatgaccggcggcagcggtgccaaaaccgggatctctttccagcgaatgttgcgtacaaggtaagaaaaaatgcccgcgagcagcgttgcaagcgtgccgaacacccagtctacgacgccgagcggacttgcaaggttcgagatgaggcagccgacggcaagcccggggatggcggccggcgtaaaagccgggagcaccgttaaggcttccgaaaagcggaactgcaccgcgccaaacgccatgttcatggcggcagcggcgtaagtgaggacagcatacagcgccgcaatcacggcgctgagcgccagaaagcggacttttgaggttttcttattcatttcagcattcctttccgcggtccgggagccgccccggccgcgctagttttgtttaaggtcaggatgtcacgactgaccgtgctgcataaatgggcgtacagcaacaggatatagcataagcaatttaggacgaaaagtcaagcgtttcggggatattctaccgattattgaaaaatggcggattcataaccgaaaatttattcgttttcgagcgttgacaagcggtttatggacattgttgattacataaacgaagttgaccgcagcaatcgtgaatatgcaaaaagcccctgcccgcagtgaaactcgggcagaggcttggttttgctgatttacttttaaattacgctttggagatgtcggtgccgaagtatttttcggagagagcggtaagggtgccgtcctcactcatttccttcagcgcgtcgttgacggctgcgagcagcgttgcggtgtcgtcgcccttacggatcggaatggcgaccttttcgacttcatcggagaacgtagcaatcttgatgttcgcttccgggtgctcctttacgtagtctgcgaatacaacttctgcgttcagggtcgcatcgatacggccggagagcagaagctcgatggtctggttgaggtcgtccacgcccgtgaccgttgcgccgtgggcttctgcctgcgttgcataggtgctggaaatggtgttggcggtcgttttgccctcgagatcttccatggagttgatctcatcgtaatcgccgcgcacgataacagcggtgcggttatatgcatacggggtagagaagttgtacttttccgcgcgctcttccgtgacgcctacgccgttgaccatgatgtcataacggccgtcatcaagaccggcaagcaggccgtcccactcgccctcgacaaagttgacctctacgccaagcttttctgcgatgttctgcgcaacttctacgtcatagccgacaaggttatcatcggcatcgtggtatgtccacggcgcccaagtgccttccatcgcaaccgtgatggtgcccttttccttgatctgcgcgagcaggtcgtttccttccgctgcggaagactcgctttctgcttcgcttgatgcagaggaagcatcgctactgcttgccgcaccggacgttgtgccgcccgaggagcaacccgtaagcacgactgccgtgagcatcagcacagccataagtaaagaaagtgttcttttcatgttctcttactcctttgcttaagtaggataaatatggataacggactgacaaaaatcaatccatgtctccctgaatggtgcgcaggaacgcttttgtgcgttcctccttcgggttctcgaaaaattctttcgaggagccttgctcgacgataacgccgtcttccatgaagatgaccttgtttgagaccgtgcgggcaaagcccatttcatgtgtgacgacgagcatcgtcatgccctcatttgcgaggtcgcgcatgacggaaagcacttcgccggtgagctccgggtcaagcgcgctcgtcggctcgtcgaagaagataatctccgggtttgtcgcaatggcgcgggcaatggcaacgcgctgctgctgaccgccggaaagctgcgaggggtaataatcgtaacggtcggaaagaccgaccttgtcgagcgcttttttgccgatctcaatggcttccgccttgtgcattttgcgggcgacgatgagaccctctgtgacgttctgcagcgctgttttgttcaaaaacaggttgtagttttggaatacgaacgccgttttgcggcgcaggcgcgcaatctcctttttggtgatcttatcgaattcgaatttttcgttatcaaaaatcaaggtgccgctgtcggctttttcgaggaagtttatacagcgcaggagcgttgttttaccggagccggacgggccgatgatggcgaccacatcgccctgctccacgtcgagatcgacgccgcgcagcacatgcagatcgccgaaggattttttaatgtccagaatttgcagcataactcagccctccttgtgtccgtaagacgcgagcttcttttcgccgaagcgctgcacccaagtgagcaccgtggagaaaatgaggtatataagaccgacctcaaggtataaaagcaacggctcatacgtgcgcgccacgatgcgctgtgtgaccatgaacatttccgttacggtgatgttcgccgcaagggaggtgtccttgaccatggagatgagcgagttggaaagcggcgggaacgccgtgcgcatggcctgcggcagcacgatgcggaaaatggtctggaggtaggtaaggcccacgcactgaccggcttcaagctgacccttcggcacggattcaagcgcagcgcggatggtctcggcacaatacgcgccctcattcagggaaaacacgataactgccgccggaaacggatcgagcaaaatgccgatgcgggaaaggccgaagaacacaacaaacagctgcacgagtagcggcgtaccgcggaagatccaaatgtaaaaacgcgcaatctgctttaaaaccttcacgtttgcgaactgcaccagcgccataatgaccgcgataatgagtgcaaaggtgaacgaaatgacagtgagcggaatggtgactgtcaggccggggataagaattttcggaaaggagtctataaagagctcccataaacgtccgctgaacatagcttttgttcttccctctttctgaaaacgaatatcaatacaaatatacgccctgtactttacttgaagtttagtatacccgtgatgggttaaaatgtcaaatacctataatggattgaaccacatgcttttcgggcatagtatacctttttcgtatggtttcaaatgcaactgaaaacccggatctcccaaacggcgagcaaagcgaccgttagaaaggcacacatgcaaaaagggacagcgctgtgctgtcccttttcgagtattcaacttttgaatttaaatcggtttaaaactcacaccgtataaaaacggaaccactttaaggacgtctgctttgtgaagacgatgcgcagctcggtgagtccggcttcggcggcgacatcgcacgtaaacgatgtgaactttgtgaggcttccggtgcctgtgccgcccgctttgccgagaacttttccggtcttgttatccgcaaggaggatctccacgtcgccggagggcgcgctcatggcgcactcgaacgcgttgcagccggtgagatccatgttcttatacacgaggaagctgcggaaatccttcgcttccacatacgtttcgccgtcgcgcttatccgtgaggaacgtgacgccgctgtaatcatcggcatcgatggcttcctgcttgaagaagcccggtcgacccgggaacgcttcgcctgcaatctccacgtcggcggtaaggcgaatatcgtcgctcgccgcgccgatttccattttatacacgccgctttcgaccgtgtagatctttctgccgttgcaccaaacggcaaggtcgtcaatcttgaagttcagcgtgaccgtgacggtctcgcccgccttgatgtgcacgcgcttgaaggctttgagtgcatggatgggacgcacacgcagggagcccggcaggctcatgtaaagctgcaccacttcgtcgccgtcaagagcgccggtgttctgcacgtttacagtcgcgatgacttcgccgttttcctgcttaacggtcagattgctgtatgcaaaagtcgtatagctgaggccgtagccgaacgcgtagagcggcttgcccctaaaatagaggtacgtcacatggtttttcgcgatgtcgtaatcgtcaagcgcggggagatcacgaacagaacgataccacgtggtcggggtgcggccggcgggattgttttcaccgaagacggtcgcggcagcaacatggccgaggcacgggccaaggtgcgtggagcacagcacggctttggcggtgtccttctccttgttgatggcgaacggatagcccgtgacgaggtacagtaaggtactctcgtttgcggccgctgcggcgttcaggagcgcggtctgggctttcggcaggcggatatccgggcggtcatactcctcacgcgcgttgatgagcggctggttacccgcgcagacgatgacgtggtcggcgcgttgcgcaagctctgctacacgctctgcgccggaggagacgacttccagtgtaaactgcttgcaggggcaatcaccggagccggcctttgcaacgagcatattttcgtcgtttacggccacagcgcggtgctgccaggtatcgagatacaaaacgccgtcttcttccttggcatacagcagttctttcacgaaccagccgaacaccacgtctgccgtgcagtttatgccggggtcgatggtgacggcgttttcgtcctgcggggtctcgtcgaagaaatttttgtcctcggtgagatacttgccggtgcgcacgctgcgcagcgtccatgcgccgaagtcccaatccgcgcgctcaaagaggtcggcggtgttctcgtcggcatcggcatataccgcgccgttttcggcgatgcgcaggtacttgccggttttttcggagcggatacgcacgcggtcaaagccttcatcgaacagtacgcggtcttcgccgagcttttctctgaagccctggacgaccggcgtttggttcggtgcatagccgcagtaccagcaggtgtagttttcatttgcgagcggacccacgaccgcgacggtgcacttgccgtcgtcggttaaaggcagcataccacggttttcaagcaggatgacggactcctttgccgcttttacggcaagcgccttgtgcgcggggcttgcgagctttgcggggtcaatatgcgcgtaggggtggtcttcatcgaaatcgccgagcttaaagcgcagcaataacgtggaatacacggctttatcgaggttttcttcggtgaggtagcctttttcgagcgcttcacgcacggcagggtcaaccatggagcggctgtcgagcatcatatccgcgccgatgccgaggatgtcgcccatagactgcgcgtggttttcatacgtacggtgcgcggcgacgttctggccgaaatcgccgccgtcgctgacagcgaacgtcatgccccactcttttttacagatttccgaaacgtccgggttgttgacgccctctacgccgttgatgcagttgtacgccgtcataaggcccggcgcgcggccttcgcgcacggcgggctcaaacgcttttaagtaatactcgtgctttaagcgcggggtgatgttcgcgttcgtcgtctggcgttcgttttcgtagttgttggcgtagaaatgcttgagcaaaggcgcggtcttcaaatacttctcgtccttgcccgtaaggccgcggcagtaggcggcgctcattttacccgtaaggcacgggtcctcgccataggcttcttcgtttctgccccagcgcgggtcgcgctccatatcgatggtgggtccgaaaagctccagagaggacggtctttcttccatatcgtgcgtgatgcgcgtttcgtcgcctgccatgtcgccgagctgctccatgagggcatcgtcaaacatggccgccatgccccacggctgcggcagaatggtggtctcgcgcttttggtcgcggtttacgacgccgcgcgcgatttcggtgccgatgtgcgtctttttaatgccgaggcgcggaatatcatcgagctgcgacgtgatcatgccgaccttttcttcgcgcgttaagcgggagagcaggtcttttgcgcgctcttcaaacggcagggtgttatcttgaaaacggtatttcatgcgaaactcctttcaaaactcattattttatagaaagcatgccgcacaaagcggggctctatgcggcagcatttcagtacgtatcagaaccaggaatccgtatagctggcttttttcgtttcttcgctcggggcgggtgcggcaacgtgcagcacaggcgtttccgtgcagttttccacacggagcgtcttcggctcgttcgggtagagcgtaacgtaattatcatcgtaatgcacacggtcgtcgctcgtcatgaggtacgcaaacggcgtgtacacgctcgcgcggatcgtcacgagcagatcgttgccgtcctgctccaccttttcaatcttcgcgtcgctttccgggaagacgtaatcgcggtaatacgcacgcaggctgtcggcggtgtcgaagccctcggcgcttgcaaagaagaagccgtgcttcaaatcattgcagacggaaatgtggaactgctgcatggagtgcggagcgaccttgagcgtctttgtgcagagactgtcggtctcgccggtgaaggtcatgtagccgcagtgaatatccgccgtgaacgcttcgggcgtttcgttgatgacagtcacttctgcgccgccctcacacgcgcggatgatgagctttttcgttgcaaacgcgcgctttaagaaatagaacgagatctttctcgtcaggtaataatcgatgatcgtccaacctgtctccggccagcaatcgttgtacatccagatgaggtcgcctgcgccgtacggcttgcggcgcatggcttcggcaagctcggcgtacagaaggccctgcatgatgccgctgtacagcagatagccgtgttcatcgagggttttgaactccgtcaaatggcggtcaatcgcgccgtcgatgttgctgcgcttgcggtcaaactcgccgtggtgcttccagatggggttatcaaagcgcatttcggtgccgtcgaggtaacggcgaacggtgctttccatctgtgcgccgaagaagccgtattcactggagaagcgcgccgggatgcggtcgaacgcctcaagctcatagacaaacttgaacttcgttttcgggtgacggccgaagaacgaccatgcgtgtacgtcgccctgttcgctctcgttggcgcggtcgccgaagtacggcgaggacggcatatacggaacgagcgggctgttgcggtgcacggcacgcggctgaatatagttgaatattttctcgccgtagaagcgctccggcttgatgggcgccgggaaccaatcggtgtaggattccgcaatctcgttgttgcccgtccagatggccatgcagggataatgtgcaaggcgctttgtctggtactcggcttcgcgctccgcttcaaagaggaaatcgtttttgtgatcggggtagaacgcgcaggcatacataaagtcgtgcatcagcaaaatgccgtactccgagcaatattcatagaagcagtccggctcatacgtgccgccgccccacatgcggaacatggtgaagtgcgccgccgcgccctcgcgcacgagggtctcgtagctttccttcggggtgcgcagataaagggagtccgtcggcacccagttgccgcccttgcagaagatgcgcacgccgttcaccttaaagaagaagttgcggctgccgtcttcgagcttagaggtatcgagctccaaggtacggatgccgattttcttcggctgcatctcgtgcaggatgccctttgtgacgcagcaggctttaaaggtatagaggttctgcgcaccgtagccgttcggccaccagagcttcgcgtttttgattgtgacgcgttcctcggcgaagttcacgccgccgacgagcatgagcgtctttttgccggtataaacagttttgctctcaaattcaagcgtataggtaagctcgcactcggcgcttgagaccatgtcggatttttcgatttcgaagtggaactccacttcggcgtcatcgccgtcaagctttaacgtatcgacgcgggacgcgatgacctgcgcaccgctgaacgcttcaatttcgatggagcggccgatgccgcaggtgggcacgggctggcaccagtcccagccgtaggtaaactgcggcttgcgggtgtagacacgctggtcacagatggcgttttcacttgcgcagtagaacgaaacggcgtcgcgcggatagtgcagctccatgccggaggtgaggcgaatgacaagctggtttttgccgacgtgcaaaaagcgcttgatgtcttcgctgaacgcgcagaacgcgttttcgtggtgcgcggcgggcatgccgtttacgatgatatccgcattgaaatcgagcatttcaatgttgaggcgcacgatgtcttcgttcagcatctcctctgtgacgtcaaaatcgcggacgagccaccaggaaagatccttgatccaccggtttttctttgtgttttccttcaaaaaaggttcttctacgatgccgttttcgatgagggcggtggtgacgtcgcccggcacggtcatggggataaagccgtatttagacgggaacgcatgattcgatttatccgtcatcacgtgaaaatgcgggttcgggtcttttaagaactctgcctgttcttcttcggaaaggtcttcaagctttaagaacgccggcagcgttgcgcgcacgggggctgcgtccattttacgcagcacttcgttgtagcgctctgccgtaacgtccataaattcgccgcgcagcttccacgcgccggcaagagacagtttgctcatgttttacaactccttcgggggatttgcacaggcgtatatttgcctttctttgcattgtagccgatgcaaagcgagaattcaatagctttttgcaaatttcatatagagaaaaaaacgcacattttcttgcaaacatgcacagttttttcgcggcctatttttgcataagaaacaaaatgggagaagcccgaaagcttctcccatctgtatacattttaatcgagatcagatcaatcgattacgcttcgccgtgagcagcgaggtactcttccatctgagcgctgagcgttgcatagtcctcgtttgcttcagcaagaacgtcctcgaggccgaggctgttcagcgttgcaacatagttgtcccaatcgtcgatggattcctgaccggcgatgacaccccagaggtactgatccttctcagcctcgatgtcagcgctgcactcagtccaggactcgaaggaagccggatccttccactcaacgaggtgagcagcagcatagcggctgttttcgccggacttattgaacagagcggtggtctccggagtattggagatgttgcactcgtccttacggttcatgaggttatcgaacagcttgaggccgatattcttagaggtgttttcctcggagtccgggccaacgatagcgacatactggccgttctcgtcgtacttgtaatcggtgccttcgataccgaagcggcgtgcgatgtagttatcggaatcgcacatgtcgtcccaagttgcatacagtctttccggatcggaagctgtgttggtgattgcgaaatatgcccaagcagcgcttgtagccgggtcttcctgcgggttgccgttggagcccttgaccatgtcgatcggtacccacttagcatccgggttggaagcatagaaggacatcatcggagctgaatccgggttgttccatgcgcaccagctgtacgttacgccgaagccgccgtttgccatctgctcgtcgcggtcggtatcctgggtgatgttcggggtgatgtagccctttgcatacagatcagcaacgtcgctaacccagttcttggtgttctcgttagccgggccgtaggtgacaacgccgtcgtcatctacgcagaaacggctgtaatgggtctggtcataggactgaatccacggccagaaggaacggaagtcgtaaccgtcgccgccgaggccgtaggtgtcgttctgaccgttgccgtccggatcgtcctccgtgaaagcgcggagcacttcgttgagctcttcgattgtggtcggagccttgaggttcaggttatcgagccaatcctggcggatccagaggttctcgcaggacggttcagcaacgtcgcccgggattctgtaaatggagccgtcggcctcagatgcatagaagagggtcttcgggtccatcttgttgtaatagtcgcggataacggtgtacttatccatgtaggaggaaacatcctgcagcaggcctgccttcacccacttgttgtactcggtatccatggtccaccaccacatgatgttcggcatgtcgttggatgccatcagcagggagatctgggactggccgtcagcccaacccgggagaacaacgagattgaacttaacgttgtacttttcctcaagttccttctgaacgcggctgtcagctgcggtgaagccggtcataactgcaacggaaacgtccatcgtttcgctctggttcagaacgtcgatcttgtcgccggtcgcagctgcgctgctgtcggtagaagctgcgctgctgtcggtagaagcagtgctgctctcggtggaagccgtagagcttgcggaagaattgccgttgctgccgcacgctgcaaatacgcttacgctcagtgcaagtgccagaacaacggatgcgattttcttcatgttcatgactaaaatcctttctttggaaataatgataatatagttttccgaagccatgcttcgggacaacccaaaagagtgcgggcttagcccttaacgccgccgatcataacgcccttaacgaagtacttctgcacgaacgggtacacgatgaggatcggcaccgtggaaaccacgatggtaccggccttgatggtctgtgcgttggtattcgtctgcgccatgacgttgacgcctgcctgctgcattgcctgctgtgtgttcgtcagcatgttgcgcagaaccgcctgcagagcccacttatcaacggaacggatataaaggaccgtggagaagtagtcgttccagtagccaaccgctgtgaacagcgcgatggtggcgatggtcgccttggaaagcggcaggatgatggagaagaagatgcgcaggtcggttgcaccgtcgatacgggcagattcttcaaggctttccggaatggaaaggaagaagctcttcatgatgatgcagttgtatgcgcttacgagacccggcaggatcagcgcaaggatgttatccataaggccgatattctgaatgagcaggaagctcggaatcataccggcggagaaaatcatggtgaagaggacaagcgtcatcaacactttgccgccgcgcagtctggacttagaaagcggataagcggtcatagcggtgagcagcgtacccagtgccgtaccggcaatcgtgacgatgatcgtggtgcggaagcccgtgtagatattcgggtttttaaatacggatttataagtatccaggttgaagcccttcggccagaggaagatgccgcccttcatggatgcttcaagggagctgaaggaaagcataatctcatgccagaacggatacagcatgatgaggcagagcagcgtaaagaatgcgtagttgaatacggtaaagatcttttcgcctgtggaggttttgattttgttcttttccatgttcataacctccttaccaaatgccctcgttgccggtcttcttggcaacaaagttgacgatgaggatcatgacgagagcgatgatggatttgaacatgcccgctgcggtagagaaggagtagtctgccttctggataccgatacggtacacatacgtatcgatgatatcggctacgtcataaaccagtgcggaatacagcatgaagatctggtcgaagcctgcgtttacgatgttgttgcagttgaggatcagcatgataacaatcgtcggggtaatcgccggcagcgtgatgttgatcatctgcttccacttgcgtgcaccgtcaatctcggctgcttcgtaaagctgcgggtcaacaccggacagcgccgcgaagtagatgatcgtgccccagcccatcgtcttatagatgtcgctgataatcagcatcgggacgaagagcgccttgtcggtaagcacctgcagatccttgcccgtgatgctcttgaggagcgcggtgataaggcccgtggacggatcgaggaaattcatgatgagaccggccataacaacccaagaaatgaagtgcggcagataaaggagtgtctgcgccactttcttgaacttcatgttgcgcatctcgttcatcatcaaagcgaggatgatcggaatcgggaagccacataccatcttcaaaatggagatgtagagggtgttgtagaaagtctgcatgaacgccggcttattgaaaagcttgatgaactggtcaaagcctacccatgtgctgttccacatgttgtaggggttgaagtccataaaggcaatcacattgccgaagatcgggatgtagcggaagatgagcatgaaaagcatgccgggaagaatcaaaagatacagccacttgtcgcggacaacgtcttttttaaagcgctcccaaccgctcagctcatacgccggctttgccggtttagctgctgctgccatacggtataacctcctaaaaatattgtgatgaccgcgctttcaataaaaagaacacacaagtctgtttttgcccgaggcaacacccgaataacaggtttcccccgtggcactgaaacataccgaaacttgtccccttttctgtggaaccgctgccatagaaaaagagacacgaacaaaacaagttaaacgatttgctttgtatttggtgcatcttacaaaaccgcggtatatcattttgtttgcatttgtgattttatcaccctcttttgtgaatgtcaacaacaaaaatagcctgtactcgtttttttgcccaaatttgtcattgattttcggtttgtgcatcttgcctaaaatttttgactttattttctgcgccatacaagtttgtgcaagcggttccatatttttcatgcgttttcaaaggacaacaaattactaaattcgcaaaattcatgaaaccgctttcacaacgcttgcagttattcaactgtattttactggtttttttcaaaaattccggaaattttgcaggaatattttttgttcagtcatttcgatcaatttagggcaatttcattttcctgtgcaagttgaaataacataaacatacctttatctttattgttaaatcatgtttatcttttaatcaaataattttcgagttgtacaccataacggcgtatcaaattacaattttgtaattttttaaaattgtcttcaaaaaggcgaaaaacttcattcctatttgcttcttccccctctgacccgaaaatacgcaggataccgtcttgtaactttcctaattcacattttgcacgcacatcgcctgtttcgggcgcttgacggcagagtaaaaacgcagtacaattatagtgaaatgacctgcacagcaggcaaacggacaagaaaggattgaacctattatggcacttaaagtcggcattcagctttactccgtgcgcgacgaaatgaaaaaagacccgatcaacgcgattcgccaggtcgcagagattggttataagaaccttgagtttgcaagctccaacgcagatacagacccgggcgttggcttcggcgtcagcgttgaggacatgcagaagcttttaaaagagaccggcgcaaacctcatcagcggccacatccgccccatcaatgaggagaccatcgacccgatgatcgcgtaccacacgcaggtgggcacgaagtacctcggccagtccgcagacttctacaccggctacgaccagctgatggagcgctgcgaatattacaactgggctggcaaaaagctctccgagcacggcatcaagttcctcatccacaaccactaccacgagttccagaagctgaacggcaaggaaattctgttccacatcatggacaacaccgacccgaactacgtcagctttgagctcgatacgttctgggcaatgcgcggcggcatggatcctctggctgttatggaccgcctcggcgaccgcctgaagctcattcaccagaaggacttttctaagacctccgattccccgatcaacctgtggacagtcagcgacccgaacgtgctcgtcacgcgggacagcttcggcaagggttccgaccacaaggatttctgcgaaatcggcaccggcatcatggacatccagtccatcatcaacaagggcaacgagcttggcgcagagtacattgtgcttgagcaggatcacacccagctgacccagatggaaagcgtccgcatcagcatggacagcttccacaagttctccggtctggattggtaaaccttttctgaacttaaaagggtatctcggcgaaaaccgagatacccttttttatttgcctgtaccgtacatttcgtccatttcattttcctttgcaatgcgcagcaggcggttgtattttgcggtgcgatcgctgcggcacggcgcgccagatttgatgaaccctgcgtttacggcaacggcaatatccgcgatgcttgtgtcctccgtttcgcccgagcggtgcgacatgacgatcttcatgccgttctcctttgcaagctccacggcggtgagcgtttccgtcagtgtaccgatctggttcggctttacaagcagtgcgtttgcggccttgcgcccgatgccctcgcgaattcgtgtcgaattcgtaacgaacaggtcatcgccgacaagcatgatttttttgccgagcttttcggtaacggttgtccacgcgggccaatcctcttcgccgagcgggtcttcaatagagcagatggggtacttttcgcacagcttttcccaatacgcgatgagctgcgcggaggtgtattttgtgccgcgcttcggtaaaagatagccgtcgttcgccgtccattcgctcgcagccgcgtcaagcgcaatcttcacctcgtccgtcgtgtagcccgcgctcgaaacggcctccaaaatgacctctatcgcttcttcgtcgcttgcgaggttcggcgcgaagccgccctcatcgcccacggagattgcaagaccgcgctgcttcaaaatgccgccgagcgtgtggtagatctcgctgcccatgcgcacggcctccgaaaacgattttgcgcccacgggcacaatcatgaactcctgaatatccacgttattcgccgcgtgcgcgccgccgtttaaaatgttcatcatcggcacgggaagcttctgtgcgttcgtgccgccgaggtagcggaaaaacggttgtttatagtgcgcggcaagcgcctttgcagcagcgagcgacaccgccaatgtggcgtttgcgccgagcttttctttgtttttggtgttgtcaagctcgatgagcattctgtcgacgttctgcaccgtcacgcgctgcatattttcgagcaccggggcaacggtttcctcaatgccctccacggctttttttacgccgcgcccgagatagcgcttgcggtcattatcgcgcttttcgtgcgcttcaaatttacccgtcgatgcgccggagggtgcgttcgccgtgccgacggagccgtcgctcaagatgaccgttgcgccgacggtcggcgtgccgcgggaatcgagaatttccgtcgccagaaccttttgtattttcatcgttttcatcctttctgttttgcaatacgctttcagtatgtccaaaagccgttttttcatgctttatatctggaaagttgaaaaccgctgtgatatactgtgttcatccacagtacgctgcaccaaaaagtaatttctgcatgatatttaataaagcagcatcgctttgaaaaccaaacggaaaggaattttcaccatgaacaaactgctgcacactccgctcaccgtccataatgtggaacttgcaaaccgccttgtcatgccgccgatggcaaccggcaaaacgccggatggtaccgtgcaggacgacctgctcgcatactacgacgcgcgctccaagggcggctgcatcggactcatcgtcaccgaacacgcctacatcagccccgagggcaaggcgcacgagggccagctctccgtttcacgcgacaccgatattccgggccttacaaagcttgtggagaccatccataaaaacaacacccgcgtcatcgcgcagatcaaccacgcgggcagcgcggcaatggaggaaatcaccggctatccggcaatcagtgcgagcgtcacggcacagtcggagtatgcacgcaaaagcgaaaagcccgtgcgcgaaatgacagcggacgacatgcacaccgttgcaaaaaagtttgccgaagccgcgctgcgcgtaaaagaagccgggtttgacggcgtagaaattcatgcggcacacgggtatctccttgaccagttctactccccgctcggcaacaagcgtacggatgcttacggcggcgacctcgacgggcgcattcacctgcttttggacgtcatccgcacggtgcgcgaagccgtgggcgcgggttacctcgttgccctgcgtctcggcgcgagcgactacaccgagggcggcgcaacgatcaacgacgcggtgtacgcctgtaaaaagtttgagaaagccggtgttgacctgctcgatatttccggcggcttcaacggctttacggtgaaaaacagaaagggccccggtttcttttcggacgcttcctccgcgattcgcgaagccgtgcatgtgccggtcattctgacgggcggcgtgacaaaggcgaacgaagccgaagcactgcttgaggaaggcgccgccgacctcatcggcgtaggccgcgcgattttcaaggacgccgactgggcgaaaaaggaaatggaggaataaccatgaaaagcgtgtggaaagtctactttaacggcagcttcggcggcaaaagcccggacggcagccaccccgggcaggtgctcaagctaaatcaaaagttccgctttgcgggacgcgattggtacgtgcccgcggcgtaccttaccgcaaaaggacttgtgctcgacattctcatgcgcgctgataaagcggcgctcgaagatttctgtaaaaaatgggagcaccttgaagatgaagacgtgccgaacgatgtattcgaacaggcggagcgcgaaaatccgctgacttttgagttttcgccgcaaattgagctgaacggacagacgctcccgttttcgcagggtcacgggctttcgtaccacccggtgtttcaaaacgctgcggtttgtgagcctgcactcgacgaatacggcgaaagcgattttgacacgcccaccgagcgcgcgatcatcgaccactacgggctaaaccccgaagacggctgggcgattcaccgctattcgttcccgtggaagacgaagcgccgcccgaaaagcatttcgtcgctcgcgttgacgctgaccccgcagcccgtgtgcgtgcccggcgcggagtttgaagttcaaaagcccggcgacatatttgcgttttcccataacggcataccgtacacgctgacagctcagaatttggagccgcagacgctgccgaaaaacgctttttccgacgcgcatttcgattttccgaatcgatttaccgcaatgacctatacagtctctcctgccccgccgaaaaacctcatctccgttgaggactgcacgcagaacgatccgcctgttgagcgcgaagcgcccaaggactacccgttcatgcccgaagcgcaaaacgctgccgttatcggcatcatcggtggtgcagacggacccacggccctgtttgtcacggcaaaaagcgaagacaaagccgtgctgaccacctgctcggcgctgcattttgcgcctccggagaagatcacgtggcgcatcgtcttccatgaaacgccgtttgcgcccgagacatttcctcttctataaaaacttgagcggtaaaactgtgagcctatgacttcgttcatgtgggaaaactccttccgtttcggatttccgcctttctttgacttaattatgaccgaccgtttttacccgcacaaacaggcacttcttcgtaactctctaaaaccccgcgccacataaaaaacactccaaaaagcggttaaaaccaactttttggagtgtttatcattttataagctatcttacacgaaattcagcgggtcaacgcgcgtgccgttctggtagacctcaaagtggaggtggttgcccgtggactgacctgtggagccgacatagccgacgatctggcccttttccacatattcgcctgcggaaaccgcaagcgagctgcaatgtgcgtagcgcgtggaatatgtaccgttgtgccagatgagcacgttattgccccaggaccagtggtactccgcagagataacctggccggattccgccgcgtaaatgggggtaccgtacggaacgccgatgtccacaccaccgtgcggcgagccgctgaacatgccgccgaaatactgcgtgatactgccgtagccgtagcccgcaagcggccaactgaatgaaaggtcgccggtgttcaaaacatcgcttgtattacccgagccggaagacgtgttgccgctgccggagttgttgttcgcggcattctggttcgcttctgcctgacggcgtgcttcctcttccttttcggcctgcgcgtttcgatctgcgataagctggtcaagctgcgaaacgtaatcttccttcgccgcctcggccgccgccaaatcgctttccgtctcgctgctctggacattcagctcgtcgatgagcttctggttttcttcctcgagcgcctgcaattcttcctgcttcttttcaaggtctttcttctggtcggcaagctcttctttttctttgttgagctcatcgcgctgatcctgcgtctgaatgcggtaaaggcggattttctccatcagctcgcggtcgtgcttcgtgatggtcttcatcgcctcggagcgcatggaaaaatcgtaaaggctcgtggaatcgaacaaaatttgcagcgtcgtcaggttgccgccggaagaatacagcgagcgcaaacggactttcaattctgcaaatgtatcggcatattcttcgtccgcctttttaatctcggcttcgaggttcgtgatattcgtattgagctgcgtaatgttctgcaccgcaaggtcgatgctcgtctggtatgttgtgatctgctcttcgagcgttgcctgatacgcttcggcttcactcgtctggtcgcgcagcgaatcaagcttttcgttaaggcgctcggcctcggcttcattttccgcctgctgcgacttaatggattcaatctgctcatcgtattctgccgtcgtggtcgcaaagaccgagttggaggaaatgagcatcgtcaccgccagcacaccggccacaaaacgcaagctttttttcttcatcttcatatcgattaactccgtgttttcacaaaaatcaagagtcctaaaaaactctacctttataatatattacaattcggtaactttttcaaggttttttgaaatctttctgtaatcagacacggaaattttacatttcaaaagaaaaaaggaggcacttagccccctcaattttctgtattagaaatatcaattcaaaatttctttcgccgcgccgacgcgctgcacgtcgtccccgtctttaaagcccggtgcgtccgcaaaatcgaagccgaacgcattcttttccggaaacagctccaaaagcgggaacagcacgaacgcgcgctccaaaatgccgggatgcggcacattgagctccttttcgcgctgtgtgaagccctcgtacagcaaaacatctaagtccatgcaccgtgcaccgtggtaaatttcccgcacgcgccccatcgctgcctctatgccgagacacgcgccgagcaccgcgcttggcgaaagctccgttttcagcaaaacacaaatattccaatagtcctgttgctcgtccggcacgtcaaacggcgcggtctgccacacggaagaaacattttcgacctccgttttcggcaaatgcgaaagcgccgcgagcgctgcgcgcagattttcccggcggtcgcctaaatttgtgccgagccccaagacgacgcgcttcatgcacggctccttgtcatttcgaccgagacgtaatcgaacaccgcgttgatgggcgcttccggctttttcagctccaccgtcacgctctgcaccttcgggtagttctccaaaatcgcatcgcataccacctgcgccgcgcgctcaatgaggtcatatttctgcgccgtgaacaccgcgttcaccgttttgcgcacggcggcgtagttcaccgtctcgttgaggtcatctgtctgcgccgcgcgggaaatgtccgcctgcatcgcaatgtctaaaataaacttctggccgttttccttttcctccgggttcacgccgtggtaggcaaatatctcaagtcccttaatgcgtattgtttccattttatactcactttctgaattgctttatcgcgtccgctacgcgcgccgcctgcaccgcttcaaacgtatcgtgcgcgcgcaccatgtctgcgccgaacagcaccgatgccgtatgtgccgccaccgtgcccgccatgcggtcttcaaacggcgggttgccgcaaacagcaccgataacgcgttttctcgacgctgccaccaaaagtgccgtacccggcacgcggattttctccgggtttgcgataagcgcgaaattttcctcatttgtcttgccaaagccgatgcccgggtcgaagcaaaggcgatttttattgacgccacgctgttccgcttccatcgttttcttctcaaaaaacgcccgaacacgttccaaaatgtcgccgcctgcgccgttcaggtcatccgggtcgccggggtgcatcacgatgcagccgcagtcggtgttttccaccgcgcgccacatttccggtgcaaaacccgtcacgtcgttgatgatatgtgcgccggctttgagggctttttccgccacctcggggtaaaacgtgtcgatggaaacagcaaggttcgtcttctctgcaactgccttcaccacgttttcaatgcgcgcccattcttcttcgggcgagatgcgcatgctgcccgggcgggtggactgcccgccgatgtccacaatgtccacgccctgcgcttccatctctaccgcgtggcgcaccgctttttcggggtcaaaatacttgccgccgtcggaaaatgaatccggcgtcacgttcaaaatgcccatcacataggttctgttcagcggaaagcgttttcccgccgcgtaaaattccgtcatatcggtctccttactttgcaagcagcagcatgacctcgttgcgggtcttcgcttccgtgcgcatgcagccacgcaaggcagaggtctgcgtcaaagcgcccgccgcacgcgcgccgcgcatcgtcatgcacaagtgctccgcttcaatgaacaccgccacgccgcgcgggttcaggttttcttcgataaagtccgcaatctgcgccgtcagacgctcctgcacctgcggacgccgcgcaaagcaatcgacaatacgggcaaatttggaaagcccgatgatcttgccgtcgcgcgggatatacgcaatatggcacttgccgatgaacggcagcaaatggtgctcacatacggagtaaagcggaatgtcccgcacaaaaacgagctcgtcgtgctcgccctcttcgtggaaaattttgagatgctgcttcgggtcggattttaaccccgagaaaatctccgcatacatgcgtgccacacggttcggcgtttcctgcaggccctcgcgctccgggtcttctccgacagccagcagaatttcccgcaccgctttttcgattcgttccagatccataaatgaacaccctttccctcatatttctcgtttccgtcattatagcacagaagctgagaaaaagaaacggcccgcagcgaaatttgccgcaaaccgtgctttcttcaaaacagatcgagcatgttgtctaaatatatttcttcccgcacgcgcagccggtattccggctttgtcatgtagtaaaacagaaattccaaaatgagcgcactgccgagccccctgccctcaattttaaagttcgtgaagcccatcggcaaatatacgttctgtatatctgcaacaccgataaaccccgggttctccatcgcctttgaaaagcggtagccctcctttgcgttcggcgcggtgcagatgtgctccgggccgtctataccgaggtttttgcggctcacggcctcatagcacgctttgcggtctttgcagccgaaagagcagcactcgttgcagagaaactccgccttgtccttcagcgcctgcggcagcgcgttcagcttttcaacttgtttattcagccgaaaatccggcacaacaaaccgaaaatcttcgcgttcgagctcctgcctgaaatcttcgaagtccgtcagcaccttcgtcgtggacgaaacaaaatacagccccgggtacgtcttttttaaatagtctaacagtaaatcggaatgcacgatcacgccgttttgcgggctttcgctttccgcaaacagcttacacagcgtgttgcacttcgggtcggataaatgcttttcctccaacaaagaattgctgaacgtcagccgcgcggagatgttatattcccgcatgagcgagagtaccgcgcgcgggtcgtgctcgccgtcgccgaggcgtccgccgccccaaaggcagtccgccggcgcgccgtaaacagacgcgatctcgcaccactcgtaaaaatattctctgtgcgctccgtacagcggcaaaaacacactgtacagctcgaaaaattcaaataagccgggcaaatgatagtacgctgtcacgtttccctccgatttaatccccgtacgggtcggcaatggcttccgaaagctccgtgccgtcctccgccacctgccgcaccgtcacgcggtcgcctttttctatgccgtccgccgcacaggtcacggcatattcggacaggaacgtcgtctccttcgcgttgccgtccacgtaaatcacactgtacggcgtgaaatttttgccgcgcaccatcagcatatcgttctgcacatacgccgtgttcacggtgatgtcccgcgtgccgaagcgcatgtcggtctcctcaaacggctgctcgccgtggtataccacacggtcgccgtacagcatgtcgtattgcagcgtgcgcagctccgtttcgtatgcaccgcgccacgggtttaactggtggaatttcgtcagtgtgcctacgttgatgtctaaaagctccaaaacacgggacgaaagctgatacgccttcacgtttttatccgcgccccccacgccgcagttgctccaaatgacgtactccgtttcaaacaggccgcccgcagaaatgtccagcatatccttgctgatctccagcgacggcatgtggtcgccgtacagcaccaaaacggtcggctcctcccacgccgtcagcacatcggtcagcgtgcgcagaaattcatccacctcgtgaatctgcgtcgcgtaatattccatttgtccgcgcaaagcggggtcttctatgccggaaagcactttgatatccgccgtctcgctctccaccggatacgcgccgtgcggctgcaccgaaatggtgtaaataaggtcgcgttcctccgtttcggaaagcgcccgcacaatctcttttgtcagaatcttatccttcgcccagccgatttcgtttgtctccacgtggttcatgtattcaagcgtcgtgaatgaatcgaacccgagcttcgggaacacgatgttgcggtcatagaacgtcgccgtattattgtgaatgacgtgcgacgcgagcccaagtttttttaagtcatacgcgatggactcacacggcgtttcctgcaaaatcgtcttgtacggatattcgcccgtgccgaagtcctgcacattcatctgcgtgatgacctcaaattccgtgttcgccgtgcccgcgccgacggacggcgcggtgaaatacccgctggggcatgtctccttcagctcttcaaaatacggcaccgggttttcggagaacgtcacgtcttttaagcggttcacgtcgaaaaacgactccagctgcaaaaagatgatgttcggcacgtcctcgggtgctttgtcctttgtgcgcagcacctccgctgcaatggcgcgcacgcggcgggcggagtaatcctccggccggtcgatacccgtgtcaacgagactgcgcgtaaacgtgtacgcaaagccgtaatcctctgtcaaacggataacatccgtatatgtattctcaccgaagcctaaggacgtcggcagatacggaatgacaatgcacacgcaaaggagtatcacgctcaccgccgtgttaaagagccggtgcaccgggcttttcgggcactttttaaagagcatcacaagccccgcaagcagcaaaatcaccgcaataacaagcaaaataaacgccggtacgctcatgtaaatgccgataaacgaccaatcgagctgcaaaatcgcaaaatcaatggcggaaagcggcgaaacgcggtagctgagcacatataaattcgcaatgccgagtccaagccacaccgtgccgatcaaaatgccgaaaaaccaccgtcgcttggaaaacaggcacagcgaaagggaaaacgtcaaaatcagcacgttttccaaaaacgccagcgggtgtgattcgagcagcacaaaaacagcggaaaagttcttcctgtccatcagctctatgacgatattcaaaaataatccgccgagaaagcaccccaaaataccccgaatgcgcgttcccttttcaaacaatccgtacagcgtatgtaaaaaccgcctgatgtcctccacccccggtctcctgctcacagttttcaaaactgccagtttctcaaaactgcgtattcagcatgattataagaccgaaaatgaattttttcaagcggtttcaacttagtattttcttaaaatttttagggccgcattttacgtttcacgcgcctttgcagcctgaatttctttcacatccacgccgcgtggggccatgttctccgtatacgtctcataacagcccccgtttctgcaattttacgcgaactgtgcgttatacaaatgccggtagaatgtgtcgccctgcatcaaactttcatgcgtgccgcgctccacaatctcgccgtcgcgcacgactaagatcatatccgcgttgcgaatagtcgataagcggtgcgcaatgacaaagcaggtcttgtccgccatcagcgtacgcatggccttttgtatgcgcagctccgtgcgcgtatcgacatttgaggtcgcctcgtccagaatgagcagggacgactccagcagcatcgcgcgcgcaatggtcatcagctgcttttgtccctttgagatattcgcgccgtcgtcctcgagcaccgtttcgtagccgtccggcagcgtcctgatgtaatcgtgtatgccgcacgccttgcacacgcgctccacatcttcgcgcgtcgccttttcgctgccgtaggcgatgttttcatacaccgtgcccgtaaaaagccatgtgtcctgcaagaccatggaataattgaggcgcaaactgcggcgcgtcagatctttgatcggcttatggtcaagcgtgatctcgccgctgtccatatcgtaaaagcgcatcagcaaattgatgatggtcgttttgcccgcgcccgtcgggcccacaatggctacaagcgcacccttcggcacatgcagcgagaggtctttgatgatctgtctgtcctttgtgtagccgaagttcacgtgcgaaaggcctacgtcaccctcggcttcggtgaggccttcggcatccggactgtccgcgacctcgggctcttcatccagtaagcggaacacgcgctccgccgccgaaaacgccgactgcaattcgccgatgatgttcgcgatttcgttgatcggcccgctgaacttgcgggagtacagcacaaagctcgaaatgttgccgatagagattgacccgcccaaaaacagcagtgcgccgaaaaagctgacgagtgaaagcgaaaggttgttgacgaagttgacggacggtcccaccatgctgccgtaataatcggcgcggtagtacgcgtccacggtctcgtcattctgtttatcgagcttcttaatggtgttttcttcttggctatacgcgcgcagcgtcttctgcccgctgatcatttcctccacaaagccgttcagctcgcccagctttgcagagcgcttgcgaaacagcggccgcgtaaagcccgtgattttcttcgtcataaacatcgaaagcggcacagtgaaaacaaacaccagcacaagcgttggcgaaatggaaagcatcatgatgagcgcgccgatgactgtgacggcgctcgcgaacacctgcaccatatcattcgtaagcgaggtgttgatggtgtcgatgtcatacgaaatacggctcaaaatgtcgcccgtctggtgcgtatcgaagtatccgactggcagctcgctcagcttttggaacacatcgtgccgcatcgtgttcaccacgcggcggctgatgacgatcataaggcgcgtcagcgcatacgaaagtgctgcggatatcgcgtacatcacaatcatcaaaacgccgtagcagcccaccttttcaaaattgactttgccgcagccgagctccatcgcatccaccgcaagacccgaaatgtatggcccagccagtgccagcaaattgccgccgaccgtcagtaaaatcgccccgagcatcaaaaatttgtagcgcatcaaatatggcaaaaggcgcgacagcaccgccttttttttcattttgggcttttcgtgtttttccgtttgcacggtttccggccttttcatgcgtgcacctcctttgcgagtccctcgccgatctgcgactccccgatctcgcggtaaagcggacaggtctccatcaattcttcgtgcgtacccatgccgatgacattgccgttttcgagcaccatgattttttccgcatgcatgatggagctgatgcgctgcgcaatgatgatctttgtcgcgtccgcacaatgcaggcgaatttcttcacgcagcttcgagtccgtcctgtaatcgagcgcgcttgaggagtcgtccaacagcaaaatgtccgggtcgcccgccaacgcacgcgcaagcaacagtctctgtttctgcccacccgaaaggttcgcgcccttaatggcgaccggcgcgtccaggccgccctgttcttcaataaattccagcgcctgtgcgcgtcgtgccgctttcaaaagctgctcgtccgtcaggtttcgccctaagcggatattctcgcgtatcgtgtccttaaacagcgtgtcgttttggaacaccacgccaaacttcgcgcgtaaatcggacgtcgcgtagtcgcggatatccacgccgtctattttcacggagccctccgaaacgtcgtagtaacgcatgagtaaacgaataatcgtcgatttacccgcgcctgtcgcgccgatgatgccgagcgtctcgccgcgctttaacgcaaaatcgatgttccgcaccgcaaagctgccgcgcgcatagcggaacgtcacgtggtcaaactccacatgcggcgcgtccttcggcaaaaagctgaagtgcggctcagtctcgaaaagctccaccggcgtgtccagcacctccaatacacgcgcagaggaagccgatgcgcgtgaaagcatcatgaaaatgcggttaatcgccattaaagcgttcaaaacgatggtgtataaattcataaacgcgatgatcttgccgatctcggaggtaccgttgttcacgcgcaccgcgcccaccgtgatgaccgccacaatgccgaggttcagcaaaaggctcatcaccgggttgatgagcgccatggtgctctctgccgtgcgttccttttcggtgaggtcgtcgttcaccttcttaaaccgcgcacgctcatagtccgatttggaaagcgccttgatgacgcgcacgcccacggcgttttcacgcaccacgcgcagcatggaatcggaagccttctgcacaatcttaaaaagcttcgcaccttttcgcgagacgtaaaacacaattacgcccacaatgggcaaggacgccaccataatgagcgtcagcatcggatccatcgtcagcgatacgatgatgccgccaaaaagcagcagcggcgcacggatgccgatgcgctgaatcatgccaatcgtctgatgcaaaacgtatgtatcgctcgtcatgcgcgaaataagcgacggaattgtgaacgcatccaccctgctttccgaaagatacgagatcttccggaacaggtcgtgccggatctgccgcgtgcagtcgcgcgccacggaggacgcaatgcggttcgccgtgatgttgccgccccacgcaatgagcgagcacacgatcatcaatccaccccacaggcataccgggcgaatctctttcagcgggatcagatcgtcaatgatatacgacaaaatccacggaatcgcgagctccacaagtgtgccgaccgccttaaagctgatgcccacgcccatacgcggcaaaaacggttttaaatacaccgccagtcttttcaaattacatgccctctttcccctaagaagctctcaatagttgtatttgcaactattatagcgtatcccgcacaacttttcaatataattataaaatattttagtaaatttaagcctttgcttgacaaaaatcccccccgtggtataatggataaaatttaccgtttgcgaaaacgaaggagggaattccatgatccacacagattttgacccggagaaaacagccgtcattgagccgagcgaattctatcacccgatggaaaatatgccggaggcactcatcggcgtgttctcccgcccgcttacggagaaatacgcggcggaatttcacggcgaagtcatcatgcaatatcaggactgcaacggtggagaaccggtctatcgctgcactgcgccgaacggcaccgcgtttgcgctgatatgcatgcgcgtcggcgcgccgtctgcctgcggcatcatggaagagatgatcccccacggcgtgaaaaagtttttgatgctcggctcctgcggtgcactcgatcacgccatcaccgccgggcacattctggtaccctacgccgccgtgcgcgatgaaggcacaagctaccactacgccccgcccgccgaggaagccgtactcgagcccgcctgtgtagatgccgtctgccaagcgctcgaagacatggacgtcccctatgcccgcgtgaaaacgtggacgaccgatgcgttttttcgcgagacgcgcggcaaggttgaaaagcgtttaaagcaaggctgctccgtcgtcgagatggaatgtgccgccatggcgaccgtcgcggcgttccgaaacgtcagatttgcccagttcatgtgggcggcagattctctttccggcgaaaaatgggacgcccgcaacttaaataagctcggcacggatgccggcgaaatttacatagaagccgccatccgcaccttaaagtacctgtaaacacacaaaatagttaagaaaacctgaattctccccgcacagactggaaatgtgcggggagttgtattataatataccaaatggagttttatgggaaagtcgcaagtctgttccgcagagtcggaatttcagtacgattgagtcaagaaaggaacatgaatatgaacgtaaaacatgaagaattgaccgtccgcgccttatatgatctcagctataccgcggcgcgcccgctgcttgaagcctgcacctacccgtgggaggcgctgccgaagatcggcgagttcattaaagcgctcggcaaaacactttcgcccgaagaatacgaccagcgcggcgaagacgtgtgggtcgcgaaaagcgccaagctttacccgaacgtctacattgcaggccccactatcatcgggccggagaccgaggtgcgccccggcgcatttatccgcggcaacgcgctcatcggcgcaggctgcgtcgtcggcaattccaccgaggtgaaaaacgccatcctgttcgacggcgcgcaggccccgcactataactacatcggcgattccgtcatgggccataaggcccacaccggcgcgggcgccgtcacgtcgaacttaaagcaggatcactcgaacgtcaccgtcttaaaggacggcgaacgcgtagagaccggcatgcgcaaattcggcgccatgctgggcgaccacgccgaaatcggctgcggcagcgttttgaatcccggcacggtcgtcggcaaaaacgcacgcgtctatccgctttccatggtgcgcggcttcgtgcccgcgaaccacatctataaaaaggccggtgaggtcgccgaaattcacgactgatcttcgccgtaaagaaaagaggtctttatggagcttttaaagcaactcatcacgcgcatactcggctccgggctgctttccaccgcccttgtgctcgtgcgtgccgtcaccgtcctgatggttttgtacgttatctggcgctgctatacctcgtttaaaaagggacagcgccgcaaagacccggtcgtcatgctggaggatgccgccaccggcgcgcattttcccgttttgtactgggaaaattccattgggcgcagccgcagctgcgatattcaaatacccgataattccgtttcgcgagaccatgccgttttaatgcgccgcgaagagggctggttcgtgtgcgataccggctcccacgccggcacgcgcgtgcgcaataagcagatcacagagcccacgctcgtgcagatcggcgacaaaatccgcatgggctccaccacgctcacgctgcgtaacgcgtccgacgtgccgcagaaaaagcgcagcatgttcaccggcttttccaaagaggcggcgtccccctttaagctgatgctcgtcgtcacgctcgttcagatgtcgctcaccttgcagctgatgatcggcacaggcgaattccgcctctaccccgccgcaccgttcgtgattctgttcacggcaagctgggtgctgtactttttctcccgccgcatcttaaagcgcgtcagctttgagattgaaaccgttggactgctcctcagcagcatcggcatcctgctcctcagcggtgaggggctcgacaccgttaaaatgcagattgccgcgttcggcatcggcattgtgcttttctgcttccttgtatggttcatgagcgacctcgagcgcgtcatgaagctgcggctctacatcgccatcggcgccattttgctgtttgttgcaaaccttgtgctcggcaaagacgtcaacggctcccgcaactggatcttcatcgggccgttcagcttccagccctcggagttcatcaaaatcgcattcgtgttcgtcggcgcgtctacgctcgaccatttgcagacgaaaaagaacatcacggagttcatcgtgttcgccgccatttgcctcgcattcctgttcctcatgcgcgatttcggcacggcgctcatcttcttcgcctgcttcctcatcatcgcgttcatgcgctccggcagcttccgcaccattttcctcatcctcgcggcagcgtgcttcggcgtgttcctcattttgcagtttaaaccctacgttgcccagcgcttctcgggctggatgcacgtgtgggaacacacacaggacagcctcggctaccagcaggtgcgcaccatgacgtatattgcaagcggcggcctcttcggtctcggcctcggcaacggcatcttaaaatatgtcgccgccggcgacagcgacctcgtgttcggtatgctgtgcgaggagcagggccttttaatgggcatggccgtgctgttcgcactcgtcctctttatcctctacgcccgcagcgatgtcacacgcagtcgctccacgttctacgccatcgcggcgtgcgccgtctcgggcatgctgctctttcaggccgcactcaatgtcttcggccccacggatgtgctgccgctcaccggtgtcacgctgccgttcatcagcgcaggcggctccagtatgatctctgtctgggggcttctggcattcctcaaagcgtccgatgaacgcacctacgctgcccgccgtgcgggaagacacccgaaaggcgaggccgacgaagacacgatttccttcaccccgccgcgctactccccgaacgacccgcccacgccgcggccccgcgtgaatacccgcgccgaaaacacggccccgcgttcccgcggcgcataccgcgtccatatttccgaagaaaacctctcgccgggtcagtcccgcacacgcagaaaggatggtgaccgccgatgaaaacgaccggctttcgctcttttgtcctttacattttgctgttcgccttctgcggcggctttgtctggttcctcatcaacctcgcgttaaacggctccacatgggccacgcagccgtataacggtcacatttacggcgatgacaccgccgtttccgccggtaccatcacagaccgcagcggcatggtgctcgccaaaacggaggacggctcccgcgtttacgccgaaagtgaagacattcgccgcgcactgctccacactgtgggcgattccagcggctacatcggcaccgccgtgcaggccgtgcaccgctcgcagctcgtgggctataaccccatcacgggccttgcgcgcaccgtgctttcggacctcggcaacaacctcgttttaacggtagatgccaacgccagcgccgccgcgtacaacgccttcaacggccgcaacggctccgcgtttgtctataactataagaccggcgaggtactcgtcaaggtcagcgctcccacatacgaccccatgaacgtcccggaggacctcaacgacaacgaagaatacaacggcgttttcctcgaccacacgctttcctccacctacacgccgggctccatctttaagctcgtcacagcggctgccgccatggagtacctgcccgattgggacacccgcacctatacctgcgaagaagaaatggacatcggctccggcaaggtgacgtgtctcaattaccacggcgagctgaacctcgagcaggcgctcggctattcctgcaacctctactttgcgcagcttgcggaggacatcggcgcggaaaacctcaaaaagaaagccgaagaaatgggcttcggtaaaaacttctcgtttgattccgtcaccaccgacaaaagcagtaccaatttaagcagctccaccagcgccatagacctcgcgtggagctccgtcggtcaggcggatgtcatggcaaacccgtaccacatggcgcttttgatgggcgctatcgcaaacggcggctccacaccggagccatacctcacgggcggcaaaagccgcacgagctacaccttaacggacagctccactgccgcttctctccacagcatgatgcgcaacaacgtcgtcaattactacggcgagtatcttttcgacggttattcgctgtgtgccaaaaccggcaccgccgagctcgacgataaaaacccgaactgctggatcgtcggtttctcggaggacgaaagcaccccgtatgcgttcgccgtgtgcgtgcaggagggcacttccggactctataccgccggtgaagtcgtctccgccgcactcaacgccattacagggaactgatcttccgtaaaccacagcgaagcgacgaataaagtttcgtccgccttttcaaaggtggtggtttccaaaggcaacgcctttggtcgtcgttcgcaaacggcgagacctttttacctaccaaaaatcaggaagataggcagaatagtccggtggactgttctgccgcaaggaaccctattaaggggttccttgaagaactcgccacagcgaattcttagaaataaagcaacgccgcaccctcgatttttcattgagagtgcggcgttactttatgccttcgcataaaattcaagctccctctgaccgagaaaaagagtgagatactgcgcaccctcaatcacagccggaaacacccacggcagcaaaatcaaaagccgacaaaatgcaacgaaccccgaggggttacctcggggttcgttgcttgaaaaaggagatttatgaaaaagactcgtactctaaattaaatcaacccgcgctgtattcggaaagcttcagttccacggttgcggactgctgcgtcgaagagcggtacacctgaagtgttaccgtatcgcccggcttcttgctgaggattgcggaacgcaatgtggattcactgtccagctgctgaccgtcaatagcggtaatcacatcgcccacctgcaagccggaagcctgtgcctcgctcgaattgagctgtgccacatactcgccctgcggcaagccgtagaagcggcccgtcatgctgtcgatgaactggccggaaataccgagaacagctctgtccttcacataaccgtactggatgagatcggagataatcggctgtgccgtatcgatcggaatcgcaaatccaaggccctcatagcccgtagcggaaattttcgcggagttgatgccaacgacctgaccatactcgttgatgagtgcgccgccggagttaccggggttaatcgccgcatcggtctggatgtattccatcgtgtagccggtcgtgttattggcaatcgcgcggttcaaagcggaaacgtaaccgatcgttacgctggagctcagctcgtggccgcccgggttaccgatggccatgaccttatccgcaacgcgcaaatcttcggaagaaccaaattccgcagccgtcaagcccgtcgcatcgatctttacgaccgcaaggtccgtcacggtatcgctgccgatcagctgcgcttcatacgtctcaccgtcggaggtcataaccttcagggaagtcgcaccctccacaacatgcgcattcgtgatgatgtagccatcttcactcatgatgatgccggagccttcgctcgccggggaaacgctgctgtccgacgtgtcggtctgcataaagccgtacttctgtgtcacctgataattctggatgcacacgacagacggtgtaagttttgctgcaatgtcctggtcgctcatcgcggaaaccgtgccgtcgctgctcgcgctcgtatccgagctcgtgtcgccgttcaccacgcgcgagattgtgaacgcagcattgctgctcgcttcggaagactgcacattgatgacgccgttttgaatcatcacgacgaatacgccaagcgacgccgccgaggtgatcgcacagcaaagcacaacggctaaaagcttcaagccgaatttcgagccgtgctttttgggcttcagctgtttttgcggctgatgcaccggcacaccgtaatacacaggctgtccgtttggctgcaccggcgcgttctgctgcggagcgctctgtgcgttccacgtatatgcgggggtgttgttcgtcggatactgtgcgttatgataggtgccgtaggcgtttgtgctgtttacagcgttattagcggaagtattggtgctcaccggttcagacccattgttcgggtcaaaaccattttggaatttctcatgattgtcactcatggttccttactcctttcacataataccatattccaaacggtttttcaacctttttttctttccgttcggattatctatattatttcggagttctgtgaagttcatgtgaagtgcagtgaacagtttcatgaaaaaagcaagaaatctctgtcacacaaaaacaacgaaagccaccggtgcgtgttccggcggctttccttatacgctgattttattttgtcgtcagatgcgcacttttcagcgccttgcgaatcaaagcggagagcggcacggaaatgatgatggcgagaatcgcgtttaccgtgctcgaagccgctttcgtcgcaagcgcaatcgccgcagcctccggcgcactgcccgcaagcaccgtcgtaatgtaggactttgcgagatacagcacaatgtatgtcaggctgccgcagatgcccgccacaatgctgcgcggtacggtaatggtaaagtcttcctccagcatgttgccggtgattttacccttgtgcgcgatgaggccgcaaaccgcagccagcaggaacttaaatacaaacgtaaacggagccgaagcgatgtacgccgggttcgtcaggtcgtagagcatcgcgccgatgccggaagccagaccgcctccgatcgggcccatcacaaagcccgcaagcaggcaaaacgcgttgccgaggtggatacgggaaatatcgcccaccggcaccggaatcgggaagctcaggtagttggaaacgaacaccagcgcgcccaaaaggcccacggtgacaatcttgtagatggaattcttgtttttcattttgattacccctttgctttggggcgcgactgcaccgttcgtgcgccgtgccttgaagattgcacccagtatagcaccgcgctggtattatcgcaatggccagatttaatataatttttaaggtcagatgattttttcacatcccaaaaagcccgccccggttgcattttcgtcaaaaaagcggtatactggcggtgcgaaaagtgtcgttcgcttttcgattatctataatatgaagaagggatattcatggcaaaagtaaaagccgttatttttgatatggacggaaccgtagccaatacgctcacttccatcgccggattcggcaacgccgcgcttgaagcgcaccgcttaaaaacgttccccgtagaccgctaccgcacattcgtcggtaacggcgcagatattctcatgcgccgcatgctcactgccgctgagggcacatacaccgaagaagatgtaaaagccctgcgcaaaacgtatgacgctttatatgaaagtgatcccacaaaagacgtaaagccctaccccggcatcgtagagctgctccaaaaaatgcgtgaaaacaacgtcaaagccgccgtgctctccaacaaacccgataacatgacgtgctatatcgccgaaaagctgttcaccgggctttttgatgtcgtccacggacaaagggaaggcgtaccgaaaaagccggaccccagtgccgcacttttattgtgcgaagaattaggcgtcacccccgccgaatgcctgtacgtcggcgacagcggcgttgatatgcagaccgggcagaacgccggcctcttcaccgccggcgtcacctggggcttcagggacgaaaaagagctcgaagaaaacggtgccgataccctcgtccataacgcagaggagctggaaaaccttatcctctaagctaacggcaatggcgattaaaagtctttcgtcaagttttcttcagaaaactttttgcctaaatataatttatcctctccaggctgcgtccggagaggatttcttcttttattgcgctttgctgtttagctcccgatatgtcccaagaattagcaccaacgaaaccacaaacgtcaaaatgtctgaaaccggcatcgagtataaaacgccgtccaagccgaaccaaatcggcagcaggattgcaaagcccacgccgaacactacctcgcgcaacagggaaagcaccgtcgagctcagcgccttgccaagtgcctgcaagaaaataaagcacgccttgttcacgcacgccggaatcatcatacacaggtaaacacggaacgccttcaccgcaaactccgtgtaaaatgcgctttcatttgccgcgccaaacagcgaaatgagctgttgcgggaaaaactccaccaaaatcagcgccacggcgcccaccgctgcttccgagatcagcagcatcgtaaacagcttatttacgcgcctaaatttctccgcacccatgttgaagcccacgatcggtatgcaccccgccgccataccgacaacgatcgagatcacaatctgaaagaacttcatcacaatgccgaccactgccatcggaatctgtgcgtactgcgcctgcccgaaaatcgggtccagtgcgccgtatttgcgcagcatgttgttgatggccgccattgccgccacaaggctgatctgtgagaggaagcttgtcataccaagcgacaaaatgcacctgcaaagcccgccgctcagcttaaaatctccctttcccgggcgaatcacacgcatattgcacaaataccagattgcaagcaccgccgtcacaatctgccccagcaccgtcgcaaccgccgcgcccatcataccccagcggcacacgaaaatgaacaccgggtctaagatcgtgttcaatatcgcgcccgccagcgtcgatgccatcgcaaatttcgggctgccgtccgcgcggataattgggttcaacgcctgtccgaacatataaaacggcacgccgagcgcaatataaaagaagtactccttcgcataacgaaacgtctccacgttcacacgcccgccaaacatcgttaaaatcggttccgccaaaagcaaatacacagccgtcaaagccgcgcttgcaagcaaaaccagtaccacggcgttgcctacgctcttcttcgccgttttcacgtcctttttaccgaggttgatactcacatacgcgcagcagccgtcgccgaccattaccgcgattgcgagcgccgccacggtcagaggaaacacaacggtgttcgccgcgttgccgtaagaaccgaggtagtccgcgtttgcaatgaagatctggtcaacaatgttatacagcgcgccgaccaaaagcgaaatgatacacggcactgcataaccgcgcatcagcttgcccacacgctccgtgcccaaaaatacgttggtgttttcttccatacctttactccctgatataaatctaaatcataaagcagcgaaatacgccgcccgaaaatccggacttacgcatctcgctgctcgattttgaaacctataaacttgtatgccgtcagttcaaatagtcgcccaccggagcggaattgtactgcttaataattttgatcacaattgagccgtctgtttccttatgctcttctacgattttatactttgtgtggctgcgttccagcccgctcttgtaattcgcaacttcctcctgtactgcgcgcatggcgtaatcctttaccacaccctctttaagctggaaatgcaacgtttgacagatacacgcagactgaattcgtttcataattatgaccattcctttccttatcaaaataaatgcggcgcatatacgcaaaccggatttacgcacatacgccacacgttttcttttattttactcttttgaaaatactttttcaaaggcagttttcgcaaaattttccggctcgcagattggacactttgtacaagcatcacacgtctgcttcttcgccccgcacacgtgccgccgtctgtattccgttggcagctcgccgtaggcctccttaaacgccgccgtaaatcggctctggctctcataccccacggcctgcgccacggacgcaatgtcgttctgcgttttcagcagcagccccgccgcaagctccatgcgatgctgcttcatgtgcgccgcaatcgtcgtgccgtacacttttttgaacaccgttttcagcgtcgtggtgttcataaggaactctcttgacagcgtttctatcgtgatgcgctcgctgatgtgttcaatcaggtaattgtgcacgttccgaatgatctcctcctgcgaagcctgaaagtccacttccttttccgggcacgtaatctccatcacctgctccacaatctcgtgcaaaagcccgatctgctcggtgtccgacgccttatagtagacttccttgccatcgcggcggctcatgataagcccactgtctaaaagcgacttcaaatggtgcgaaactgccggactcgacatatccatcatcgctgcaatgttgataacacattcttcccggtgacttaaaagccagaaaatgcgcacgcgcaccgggtcgctcagctgcttgaacacatccgccacggccgaaaaacgctccgtattcatcaattctctgtgcagcgcttcgtcgtgcttgtgcctgccgtggtcgtgcggcaatgcaaaatccgccataaaaagccctccgtttatccgtttcggaaatcccgttcgcccgtttggaagcagcacccgaaaaccccttgattttttactccggtcccagtatactacaactgtaacgattaagcaagtatttaatcgttagcaccacatttcaaaacaaaatgattttttacggaggtttttcccatgaaaaaaacgtacagcatcgaagttgactgcgcaaattgtgccaacctgatggaagaagcaaccaagaaaaccgcaggcgttgcaaatgcgaccgtaaacttcatgacccagaagatgatcgttgagtttgaagacggtcaggacgcaaaggctgtcatgaaaaacgtcctcaaggcctgcaagaaggttgagccggactgcgaaatcgagttttaatctgcttcggtctacccgtatcgtcagaaaaaatggccggctccgctttctcggtacagtcggtcttttttcacacggtaatgtgtcatttaactgctatataaaaccacaagaggtatcctcatgaaaaagaaacaaaagattatgctgtaccgcatcatcatcaccgccgtgatgctggtcgtcttacagctccttcccatcacgggtattccgcgccttatcgcgtacctcgccgcctatctcgtcatcggctacgatattttgagaaaagccggcaagggcatcctaaacggccgcgcgttcgacgaaaactttttgatggcgctcgccaccctcggtgcgttcttcctcgccatttggacaaagagcggcgattatcttgaaggcattgctgtaatgctgttctatcaaatcggcgagctgttccaaagctacgccgtcggcaaaagccgcaagaacatctccgcgctgatggacatccgcccggactacgccaacattgaaaaagacggaaagttagaacaggtcgatcccgatgaagtcgcggtcggcagcatcatcgtcgtgcagccgggcgaaaaagttccgctcgacggcgtggttgaaagcggcaacgcaagccttaataccagtgcgctcaccggtgaaagcctcccgcgcgatgtcaaagagggcgatgagatcatcagcggctgcatcaatttaaacggtgttctgaaaatccgcaccacaaaggaattcggcgagtccaccgtttccaaaatcctcgacctcgtcgaaaacgccagttcccgcaagtcccgttcggaagcgttcatctcccgcttcgctaaaatttacaccccggcggtctgcatttccgctgtactgctcggcatcgccgtaccgctcctgcgcatggcgttcggcatggatgccgcttgggtcgattggatctaccgcgcgctgaccttccttgtcgtcagctgcccgtgcgcacttgtcatttccatcccgctcagcttctttgcgggcatcggcggcgcaagccatgagggcgtgctcatcaagggctccaactatcttgaggccctctccgatgcaaaaatcgtcgtgttcgataaaaccggcacgctcacgcagggcgtgtttgaggtcaccgccgtccaccacaacacgatggacgaagcaaagctgctcgagtacgccgcgctcgccgagtgcgcctcctcccaccccatcagcaaaagtttgcagaaagcctacggcaaagagatcgaccgcagccgcgtaacggacattgaagaagtcagcggcaagggcatcaccgccaaggtcgacggacacgaggtcctcgccggcaacgcgaagctcatgacgctgcacaatatcccatataacgactgccacagcgtcggcaccatcattcacatgtcaatcgacggcgaatatgccggtcacatcgttatctccgatgtcatcaagccccattccaaggaagccattcagaagctgaagcacgccggtgttgaaaaaaccgtcatgctcacaggcgatgccaagcgtgtggctgatcaggtcgccaaagagcttggcattgacgaagttcgcagcgagctgctcccgggcgataaggtcaacgaagtcgaaaagctcattcagaataagccgaagaaagcaaacctcgcgtttgtcggcgacggcatcaacgatgcgccggtgctcacccgtgccgatatcggcatcgccatgggcgccatgggcagcgatgccgccatcgaagccgcagacgttgtcctcatggacgatgacccgatgcagattgcaaaggccatcaaaatttcccgtaagtgcatcggcatcgtcaagcagaacatcgtgttctcgctcatcatcaagttcggctgtctcgcgctcaccgcgttcggtcttgcgaacatgtgggcagccatctttgcggatgtcggtgtcatgattatcgcggttctcaacgccatccgcgctttgaagtacaaagaataaaagataacataccaaaacgccctcccgctgcgatttttccgtaagcgggagggcgtttttcgttttctgtttcagcttttaatccttgtacagattgcccgtgtaccaatccaccatgccgttttgcacagcgtcctcaaagtagtcgggccagtagtccggcgctttgccggagggataccaaatgtccgggtacaacgcgttttcgttctccgtgatttttgaggtgtccacggtcgcatcttcgccgtcacgcaccttgcgcgccacgatcaccgtgcggaaaccctcatattcatacgagcatgttgaaagcatcaccgttttgtcgttttcgttcaggtcaacgccggtgttcaccatgctgcgtttcatcacgtcgtagtaaaactgcatcttgtcttccgcagagtcaaaatcgccgcgcagatagttgaacagttccccttggttatcgtatgtattcgtcttgaataccgaaacaatcttccattccgccgcttccttttcggtgtcatagcggaataccggacagcttttcacggtcttggcactgccaaaaccgatcacctgccagaacattctgccgtcctgcatgctgtgtccgtgcaaaacctgattatcggagtccaccgtgcacataccgtccaaaaagatgctgccgtacttcgtgctttcctttttgtagttgcggtaaaggtaatactgcgggtcgtctgcaggcggcgtcagcaccggaaaattgatgtccgtgccgtccagttgcacccagcccgtaatgtcgctgttcacactttgcagcttcaaaacagcctcgcgacggcgctccagctctgccatgcgttcgctgtccgccgtgtcgtcttcggaagaaaccggggccacgctttccgtgtcgcccgcttcggagtagattttctgaatctcacctacgtttttatccgtcacatacgggttcacaatgagctcaattacaagcaccgccgccgaaacgacaaaaatcaccgaaaacagcgtgatgagcaccgggaacagaattctccgctttctcggctgcacactttcttcgtcttcatagaccgccacgcgccgcataggctccggctcgcggtatttgcgccgcacgcgttacgcctcgtccaccggcaaaccggcaaggtagcggcgcaccatatcgagtgctttggaggccgcgcagtggcggtgccattcgcgggatttcagtctgcccatcggctggcgctttgccacccacgtgttcttgccgtcactcaacgcaatgtacacaaggcccaccggcttttcttctgtgccgccgtccgggcccgcaatgcccgtaatgcccacgccgatgtctgcaccgctcgcacgcacaatgccctccgccatcgcgcgcgccgtctgttcgctcactgcgccgtatgtcacaagcgtctcgtgtggcacgccgagcaaacgctccttcacgcagtttgcatacgtcacacagcccgtctcaaacacggcggaggaacccggaatatccgtaatgcgctttgcaagcatgccgcccgtgcaggattccgccgtcgcaagcttcttgcccgcctttttaagcgcactgactacaagctcctccagcgtctccacgtccacaccgtacacgaagttgccgatgcgcttcttcaattcttccaccaccggcacgcacatcgcgtccgcttcttcttccgttgcggccttcgccgtcacgcgcacgaacatctcgccttccttggcatacggcgccacggtcgggttgctctgctccatcaggtcttcgatcatctgtgccaccggcgcttcgcctctgccgtacacatgcacactgtgcgaagcgatgaccgcgctctggaatttctcaaggtatggcacggcatagttgtgcagcatcggggtcaattccgaaggcgggccgggcagcatgatgacgatcttgcccttgtccgtccggaacgcgcagccgggcgcagtgccgttgtcgtttttcagcgcggtgcagccctccggcagcatcgcctgcttcatctggttttcggtcatgccgccgtttgcaaagtaatcgagcaaatgctggtagctctgctcgtgcaaaacaagcttcttgcccgcagccgccgccacggtctccttcgtcaggtcgtcgcccgtcggcccaaggccgcccgtcgtgatgagaatatcgcttctgtcgagcgcgtcgtaaacggccttttccagtctgcccacgttgtcgccgactacggcggcgtagagcagatcaatgccgagcgccgaaagcgcctttgcaacgattgttgtgtccgtgttcacggtctggccgagcaaaagctctgtacctaccgatagtacttctgcctgcatggtaaaattcccctttcttacagatgacggatctccgtcttttcaaggcaatttttcaaaagctgttccacatcaagcttctgttccgcagcctccaccacatttaaagtggggcgggtgcgcgggtgcttcggcgtaaacaccgtgcagcagtcttcatacggctcaatggaaatatcatacgtgtcaatgcggtgcgcaagcgtcacgatttccgacttgtcgctgccgataagcggacggaaaaccggcatattcgccgcggcgtccgtgcaggcgatggcctgaatggtctggcttgccacctgcccaaggctctcacccgtgatgagtgcgctgcattcgcgctcgcgtgcaatgcgctcggcggcacgcatcataaagcggcgcataatcacggtcgcaagctcctccgggcagttgtctcgaatttgctcctgaatttcggtgaacggcacggtaatcatgtccattctgcccgcgtattcgccgaccttcttcagcagcgccaccaccttttcatgtgcgcgctcgctcgtgtacggcgggctcgcaaagtgaatggctgtcagctccacgccgcgctttgccatcatccaggctgccaccgggctgtcgaggccgccgctgatgagaatggccgccttgccgcccgtacccaccggaatgccgcccgcgccgggcttcgtctcgccgtggatatacgccgctttctcgcggatttccacgcgcaccgtgatctccgggttatgcacgtctacggaaatgtgcgggttcgtgcgcagcagcgccgcgcccacctcgcgggagatttccatggagccgagcgggaacttcttgtccgcacgcttcgattccaccttgaacgtcttaaagcccgcaagtgtgtcattgaggtattccggcgccatttttgtaatggcgtccatgtccttttcacacacgcaagcgcgcgcatagccgatgacgccgaaaatcttcgagatgcgttcctcggcctcgtcaatgtccgcgtcctcgtctttcggttcaatgtaaatggtggactgcatggagtacacctcaaagttgcccgcgcgcgcaatgcggcggcgaatgttctttaacagccggtcttcaaacgtgcggcgattcaatccctttaagacgatctcgccgagcttgaccagaatcacttcctgcatgacaaaattcctttccatctataaactcacgcttacgcgtgcgaaagcgtttggaggccctctttcaaggcgtccgcaaacgcgtccatttcttctgctgtgttttccgccgaaaggcttatgcgcagcgatgtttcaatgcgctccttcggcagctgcatcgcgctcagaacgtggctcggttttgccttgccgcacgcggaaccgcttgaaacaaaaatgtttcgctccgccaaaaagtgcagcatcgtctccgcacgcacgcgccctgccgaaagattcacaatatacggcagcgcgttttcgggcgagttcaaaacaacctccggcatcgctttcagccgttcaatcaaatgcgcctgcaccgcttttacgtgtgtgagcgcctctttttccatcattatgtgcttcaccgcttcgccgaacgcacaaatttgcggcacgccctcggtgccggggcgcagatttttctcttgcccgccgccgaagctgtgcggcaaaatgcgtacgccgcttttcacgtacagcgcacccacgcccttcggcgcatgcaccttgtggcccgaaacactgatgaggtcaacaccgagctttttcggctggagcggaattttgcagaagccctgcaccgcatccgtgtgaaacagcgccggggccttttttctcttgatcatgcccgcaatgtctttcagcggcagcaaaacacctgtttcgttattcaccgccatcacgctgaccaaaatcgtcttcgcatcaatggccgcgtcaaatttctctttcggaatatttccgtccgcctccggctgcacatacacaacctcaaaaccctctttttcaagctgtgccatcgtattgagcaccgccggatgctcgattgccgtcgtcacaatcttgttgcccgcgcgctttttcgcgtgcgccgcacccaaaatcgcaatgttgtcgctctctgtgccgccggacgtgaaataaatctcccctggctgcgccgaaagtctctcggcgatgatctcccgcgccgcagtcatctccttttccgccgcaaagcccttgctgtgcagcgaagaggggttgccgtagcattccgtcatcatgtaaagcgccttttccgccgcctcttttgaaacgcgcgtcgtcgcgctgttgtccaaataaatttcctgtgtcgtatccatcattatcccttacagttttcggtagccggtcgaaaaatcgaccacatttctaagcggctcacccgccagaaaacgcttcaaattctccgccataatacgcacaatgcggtcgtgcgtctcctgcaaatggtacccgccggagacatgcggtgtgatgatcgcattttccatcttccaaagcgggtgatctgcgggcagcggctccgggtcggtcacatctacgcccgcgcccgcaagcttcccgttttccagcgccgcgcacagcgcctctgtgtcaacgatcatcccgcggccgacgtttaataaaatcgcgccatccttcatcttcgccatgcgctctgcgtcaaacatcccctttgtcgccgtcgtgcccggcagcgtgatggccacgcagtccgcctgtggcaaacattcgtcaagcttatcggtgtggatgagctcgtccacaaagtcgggcttatccgtgcccgtgcggcgcacgccgatcacccttgcgcccaacgctttcgcacgcttcgcaaattcaccgccgatgtcgccgaggccgagcaccaacaccgtcgagttccacgccgagcgcacctgcccgaggtcgcaccacttgcccgtgcgctgcacatcgcggtacaaatgcagcttttttaaaagttcaagccacaccgcgaccatgtattccgaaatcgcaaggccatacgcgcccgtcgcattcgttaaaacggtctccttcggcagacagccgtggatatatccgtccacgcccgcactgttcgtctgcaaccatttaagcttatcgccggtcgagatgagcttcgggctcacgttgccgaggattatatccgcgttctgcacgtcctcgcgctccgccttgccctctttataaataaacgtctcccccggcgcggcttcttcgagccacacgcgctgatagggcttcgtctccatcgcaactaaaatgttcacagtgtttcgatctcctctctccacaccgtattgcacgcgtcgctcggcatgcggaaatcgccgcgcggcgaaagcgtcacagagcccaccttcgggccgtccggcaggcaggagcgcttaaactgctgttggaagaagcggcggtagaacgttttcagccactttttaatggtctcggcgtcatactgccccgcaaatgagcgcagcgccatcgcataaattttacgtggcgtaaacccaaagcgcagcatataatacaaatagtaatcatgcagttcatacggccccacaaggtcttccgtcttctgtgaaatttcgccgtccttcggcggcaataattccgggctgaccggcgtgtccaaaatatcaagtaaaacacggcgcagctcgtcgttgccgtgcatcgcctcataacgcacaagatggcgcaccaacgtcttcgggatagacgcgttcaccgcatacatcgacatgtggtcgccgttgtacgtcgcccagccgagcgcaagctcggaaaggtcgcccgtgccgatgacaatgccgccgtgctgattcgcaatgtccatcaaaagctgcgtgcgctcgcgcgcctgcgaattttcatacgtcacgtccagcacctcgggatcgtgctgaatgtccttaaagtgctgctccaccgccttcgcaatcggaatttcatcaaaatgcaccttgagctcttccgcaaggcactgcgcgttgctcttcgtgcgcgccgtcgtgccgaagcatggcatcgataccgtgcggatgcccgtgcgcgacaggccgagcatatcaaacgcgttcgccgtcacaagcaacgccaacgtggaatcgagaccgcccgaaagcccaatgaccgccgttttgcagccgatgtgcttcagtctcgtcgcgagacccgtcgcctgcattttgaggatcgtctcgcagcgtgcggaaaggtccgcgtcgtccttcggcacaaacgggtacgggtacgccgtgcgcgtcgtctcaaactcgggcaggtccatcgaagcgtcgatgatgtcgcacacaggctcgtcctgccacgtattcatgcggcggcgctcctgcacaaggcgctccacgtcgatgtcgccgtaggtgatgccgttcgtaaacaaatcgctctcgttcagtaacgagccgttttcgcaaatcaaattgtgtcccgcaaagatcatgtccgtcgtgctttcgccaaagccgctgtccgcgtacacatacgctgcaagcagacgaccggagtgcatacgcagcatgtcgcggcggtactgcgccttaccgataatttcatcgctgcacgaaagatttaataaaacggtcgcgccgccctttgcaagcgtcacgctcggcgggtctgccacccaaacatcctcgcagatctccacgcccacggtcacgtccggcgcaagctcaaacaccacgtcacggcagccgtaccagtcgcccgcatagcgcagcataccgctttccggcgcgggggaaaaatggcgcagctcgtaaaattcggagtaattcggaatatgctgctttgccggcaggcccagcaaaacgccgcggctgaacaccgccgcgcagttatacagcgccccgccggacgggatcggcatacccaccgcgcacagaatatcgaggtcttccgtctcttcgatgaggtcaaacaggcacgccttcgcgctttccatcagctttctgtccttaaacaggtcgccgcaggtgtagcccgtcatcgcaagctccgggaacgcgatgaccgaagcgccgtttgcggccgcctcgcggatcatcttcgccatctcgtttttgttgtacgggcaatccgccaccttcacgtgtggtgtagccgccgctacgcgcaccattccgtctatttttatgctcacaaataagctcctctcaagtgtcaccggaggtgacacaattatattcacttgcacaaattccccctgccgaaaaaagagcagggggaaactgtttttattctcattcgccggtttcggccgccgtcacaggctccggtgtgggctcctctgtgggggccgccgtcggctctacggtcggttctgcggtcggcgcaggggtcggctccggcgtcggcgccgcagttggggcagccgtcggcgcaggggtcgcagtgggcactgccgttggggttgccgtaggtgtcgggctcggggaagacgtctccgtgcccgggccgatgcggtaaatagtgccgcttgggccgtagtaggaggaaggcagcgtctcggtgcggatgacctctccgtccttcacaaagtcgcgccaagcgctcgcctcatagccccagttgccgcttgtggaaagcaccttttcgccctttttaaggttctggtccaccacgtatttcacagtgctcagcggcgggatctcgctcgtcgtctgggaatacacattgatcgtgtcccactctttcgggtgcttgccgtagaactgcacatgcagcgtcacaccgtccatccaactcataatgtacaccggggtgtcaagatcattgcggaactggaagtcgatctcgccgtaactcaccgtcgcgtccagaccgatcggcacatacgtagacggtgaagaatggcagtcgcgcagcgtgattgtcatgcccgcacgcagcgcagcgccgtagatcgttgaagaagcctgacaaatgccgccgccgtacatctgcaccagcgcgccgccggaaaggccgcccgccggcaaaaagcccgtggaagcgtttgtggaatcgcccacgatgttttcataagagaatgtgtcgcccgggttcaaaaccgtgccgttcacgcgggaaagcgccagccccatgttgtggttgccgttttccgtattcgtcgagaccgtctcaaacgaggagatcatgccgaaatcttttctcaggtcgtccacggtcactttcgccgcagtctcctgcaaagcagcctccacttcgccgctcgtcttcttaaggaactgcgccttcacggcggcaagcgttccgtaaacgtccagctttttgccgttcacggcgtcctcaaacataaagtcgcccgcgtcaaagtcataagagcccacggtcgcatccttagcctgcacgacgaaatcgccgagcttctgttttaattcattttcaaaatttttgagcgtcaggcaatacgtcatttcgtagtcgcctgcttttctcgatttcaaaagccgcgtcagcgtaatatccagcgtatccacaacggtcagctcgctgcccttggcggtcatttcggtatcgccgcttttcaccgtgacgttaatattcgcatacggctttaacgccgctgctctacacaccttttcggcttccgcgagcttcattccggaaatgtcgatgccgtccatcgtggtaccttccgcaaacacggtcaggtcttccggctccggggtaggcgtcggcgccgccgtcgccgcagcgtcggaagacgtcggcagcttatcgcagcccgcaaagcccagcatcaagacagccgccaaaactgcgccgaccgctgccgcgcgatattttttcgttttatgtctatacatgagatcgcctttctgaaaatcccggcagcttctcacagccgcttttctgtatcgtaccgacttattttttgtagatattctctccttttcgccggcaaaataccggctgagaatattatacccgccgcgtcttttcttgtaaagacatacgtttaaatatatgtcttaaaagtttttgaacgcatgtagttctctgcttatttttaagtataccgcaaagccgcaaaaaagtctccagaaaaatgcaaattttccgcaaatttcactcttttttcggatttgatttcttaatttccgcacaatatatggaaattcacaaaaaaatgtgataaactggagcaaaggacagggggatctgaaaataagttttgatttttcagacacacccgatgaaaaggctattgaaaaggagcggtatcatgcgcattttgattctcacctgtgccaccggcggcggccacctacgcgcggctgcggcacttgaaaaatacatacgcgaaacaaccacccacgaagtcattcaaatggacttcttaaaaagcatcggcaagctgctcgacaaaaccatttgcgacagctacctctttatggcaaagaagaccccgtctctcttcggccgcctctacaaaacgacaaataaagataatccccttgcggatttcgtcccccgcacaacggagcttttggcgctccagctctatccgcgtttagcggaggtcgcgccggacgtcatcatcagcgtgcacccgttcgcaacagagatgatctccggtttaaaggagcgccgccgcatcacctgcccgctcatctgcctcatgacagactacggcgtgcacaaggcgtggatcgccccgaatgtcgatgcctacgtcgtcgcctgcgacgacatggtgaacgacctgcgccgtctcggcattccgaaagagcatatctacccctacggcatcccggtacacgacgtcttcttcgacaaggaagaccaggcgaagctcctcaccgaaatggacctcgagccggaagtgcccaccgtgctcttcatggccggcagcatgggcgtctccaacatcgtagacctctaccgcggcctgtgctcctccccgctcgatttacagatcatcatcatcacgggcaataacaaaaagctctataagctctttgaaagcgaaattccgaactcgtcgaaaaagacaaagcttgtccagttcacaacggaagtagagcgctttatgcacgcgtccgacctcatcatcacaaagccgggcggcctcaccgtctcggaagcgctcgcgtgcaacctgccgctcgccgtgttcgacgccattcccggtcaggaggaagataacgccaacttcctgcaaacgcacgatatgggcgtgcgcgtcacaaaggagaatttctccgctgtcgtgtcctcactcatcgagcataaagagcgtctgcgccgcatgcgcgaaagctgccgcacattcgataaatcccgcgcgaacgagaacatcgtcgcgctcgccgtaaggctcgcaaaggaattcgcctcgtataacccgaacatctcattctccacggataaaggcgtgttcaacttccgcaccgccgccatcatcgtgcagaacggcaagctgctcgtcacaaaagacgacagcgcagagcactactacctccccggcggccgcgtcaccatgcgtgaaaaggccgaggacgccctcacgcgcgagttaaaagaagagctgggtgtcactgtcgcgccggagcgcgccgtgtggattgcccaaagcttcttcacccctacaggcaaaaagcagcgttaccacgagctttgcacctacttcaccgtagacgcttccgacaccgatctcatcacccgcggcgaccgtttcgacagtccgaatgaaccgagcgtccacttcgcgtggttcccgtttgaagagctgccgtatattgatttaagaccggcatttttgaaaaccgaagttcaaaacctgccggagcatacgcagtttattacgattggggattgacacacgttcaccgcagtacggcgagccgaccacctaccccggccttgaaaaccgcatctccacgcacctcgaccgcctgagcaccgacgccgtcggttccggcgaggtctacaacgaatactggtcggtgtccgaaaattgcgacgcgtcactcggcgtcagctttctccccgacggccgcctttttgtggacatcgtctgccaaaccccgcgaacgtaattttagtaaaacttcaaaaggacagcttccccggaagccgtccttttttcattctcattttatctcaaaccttatcccgcatctccgtcatacggttccagtagcgctttggcatgtgggtgcggcggcacaggtcgttccgtctgccctcaatgcccacggtgtcgtagaacgtgcgccacatggcgcggaatttctcctcctccggcgattccggcggcagctcgatgtgctctgcctgcaaaaattccgtcgcgccgtctttatataataaagcaagcttatgcgtgcggtcgaagatcatgaaatcttcaccggaaaaacggttgataaaatgcggcgcgataacgggtaaaacgctgtttttcggctcaatctgcgcgataagaacgtcgccgtactccgcaaagcgcagaaaaccgaggtacaagtgcgcttcccgctcaaggaactgcaccgctttcgtgatcttatcgacggcaggctcggtcagccgcccgcacacgccgcgcccgaccttgtaccccaaccgcatgaattccagcatacgcagttccttttcgggcatacaggtaaaaaacgcgcgctccaaaagatcctgcgcctccatgcccattttcttcggaatcgacacgcgcacacgctcggaacggcgcaggtcggtctcgatatacttcgcgccgaataaacacgtctggtcggcttcatcaacgggcaaaatcgcggcaggtgtttctttttccgcaaagctctcgaacacacaggaaagaaagccgttatatgtgccgtcgtagtaatacattacagttgtccggtcagacattttactgcgtcctcctttgtggggttgaataatgaaagctgctcgggagtttcgggctgtatgccgccttgcggcagcccgcggtcgcgcagaatgcccgccaaaaccgccggttcgtctgtgcgcaaacggcactgcattttgccgttgcaggtgataaaatacgaagcacgctttaagacgacaccgagctttttcagcccctcgtggtcgagctttgcttgccgtctggcgcggataatgcgctttgcgctcaccacgccgatgcccggcacgcgcaacaatttctcatacggcgcgcggttcacctccacggggaattcctccgggtggcgcaccgcccaactgcacttcgggtctaacatagggtcgaggtcgggcgttttttcgctcaataattcatctgccgtgaagccgtaaaaccgcaaaagccaatcggcctgatagagcctgtgctcgcgcagaagcggcggcgcggtgtcgagcgcgggaagatttctgtcctgcacgactggtatatacgcagagtaaaacacgcgttttaaagaatacttgtggtaaagtccttcgctcagctgcaaaatacgtcggtcgttttccggcgttgcgccgatgatcatttgcgttgactgcccacccggtacgaagcgcggcgcacttttgtaccgtatgagatcgtgcgcgttttccttgatgccgtcgcgaatgcgcgacatgggcagcaggatattttcctttgatttctgcggcgcaaggcgctttagactgtcgtttgacggcagctcgatattgacgctcatgcggtcggcaagcaggccgagccgctgcaaaagtgtctcgtccgcgccgggaatggctttgacgtgaatgtaaccgttgaagtgatactcgttacgcagaatatgcaatgtttcgagcattctttcgcaggtgatgtccggcgagccgaacacggcggagcttaaaaatagcccttcaatataattgcgacggtaaaagttgatggtcagatccgccagctcctgcgggcgaaacgtcgcgcggggcgtgtcgtttgagcggcggttgaggcaatacgtgcagtcataagcacatatgttcgtcattagcacctttaaaagggagatgcaccggccgtcacttgcaaagctgtggcagatgccgcacgcggcggcagagccgagctgcccctttacgcctgcgcggtttacgccgcttgaggtgcacgccgcgtcatattttgcggcatccgataaaatgcgcagcttttccatggtgtccatttgtgtgttcatgctgttctccctatcttaaagcgcgacgcccttgaacgggttttcgacgtgtgtgcggcggttttccgcggcggactgaaagaggtctttgtgcatcaccttgatgccgcgatcaatgatgtcgccgccgtatttgcagcgcagaaaatcgaccgtcgtttcgagcttttgggccttttgtccgcgcgcggcatcttcaaacagcgagcactgcgacatgccgagcggcacgagcgacgacacacgcacgccgatgctgcggatggattcgcccgtgtggtgggcgcggaaaaggccgtaggcggcgtcgaaaatgcttttggaatccgccacggcggtctccagcatcttctggcgctgataagtctcgaggttatatttgcgcacggaaagctgcacgttgtagccgcataagcccttttcgcgcaatctttgtgcgacgctttcggagagcatgtagagctctgcgcgaatttcgccgtcgtcttttaggtcgtgcacggcggtggtgctgttaccaatgcttttgacctcctcgtgctcgttcacacggcgcacgggcgacctgtcttcaccgtttgcgtacatacttaattgctcgcccgccttgccgaatagcctttttaacagctttcggtcggcttttgcggcgtcgccgatggtgtagatgccgtattttctgagcgcttcctgcgtcgatttgccgacgaacagcaggtctgccgccgggagcggccacacgagctctttaaaattctcgcgcgtgaactccgttacggcatccggctttttatagtcgctgccgagctttgcgaaaatcttgttgaacgacacgccgattgacaccgtgagcccgagctcatctttgacgcgcgcgcgaatttcctccgcaatctcgcggccgctgccgaacaagcggcggctgccggtcacgtcgagccagcactcgtctaagccgaagctttccaccatgtcggtgtactgcatgtagatctcctttgcaaggcgcgaatactttgcgtagcgctcaaaatgcggcgggacgaacttgatgccggggcatttgcgctccgcttcccacagggcttccgccgttttgacgcctttggccttcgcgagcatatttttcgcgaggacgatgccgtggcgacgctctttgtcgccgccgaccgccatgggaatatctttcagcgacgggtcataaagcgtctccacagaggcataaaagttattcatatcgatgtgcagaatgacccgatccacggcttttgcctcctttcgacgcgttgcgaacatgcgttctctatgctcttattatagaacatgcgttctgatttgtcaagcggtaaataccggaaaaagcgcgttttgaaaaagatgtccgcttgtgtcctgtgatgttctgcttctgaaaccgcagagatttatgcacaatttgttaccttagtgttaccctaagaacaaagtgtaaacttagtgtgaaagaagtctcggttttcttgaaaaaaagtttttcgcgcattatacttttaactgtaaaattttatttttaaccttatctctataccctcatttctaaggaagtgtttttatttgtttcttgaaaaattgagaagatttatgtacggccggtacggcacggacgaactgaaccttgttttgatgatcctcggtatcatcgtgatgttcctttcgcgcattttctggttctggccgctcgcaattatttcttacgcgctttatatctatgcgctgttccgtatgttctcgcgcaacatccccgcgcggcaaaaagaatactattctttcttaaaggtatggacaccggtgcaaaaatggtttagaattaagaaaacggcttttcgcgagcgcaagcagtacaaatacttccgctgtccgggctgtcgccagcagctgcgcgcaccgcgcgggcgcggtaaaattcttgtcacctgccagcgctgccacaagcagtttaaacaaaagacctgattagggcaaggagtttgaaaactatgaaagttgcaattttaggcacctggcacgtccacaccaaagagtacaccacgggtgtactgaacaacccgaatgcggaagtcgccgtcgtttgggacaacgacgcagagcgcggcaagaagttcgccgatgaaatgaacctgccgttcaacgcagacctcgacgctgtacttggcgacgagagcattgacagcgtggtcatctgcactgcgacctgcgaccacccggaggtcatgatgaaggtgacggcggcgaagaagaacatcttcaccgagaaggtgctcaccatcgaccccaaggacgcagaaaaggtcgccgaggctgtgaaggcttccggcaaggtatttacgatctcttatccgcaccgcacgttcccgacgctgcgcgcggtaaaagctttgatggacagcggcaagctgggccgtgtgacctacgcacgcgtgcgcaacgtacacaacggcagctccgcaaactggcttcccccgcatttctacgataaagcacagtgcggcggcggcgcaatgatagaccttggctcacacccgatgtacacgctttactggctgctgggagagccgaaatccattacctccacgttcacgcaggtgacgaaccgcggcgttgaggacaatgcggtttccgtcatcgagtttgcagacggcaagatcggcgtttccgagaccggctttgtctccgagtgcaacccgtacacgctggaagtgagcggcacggacggcgctgtgatggtacacggcgacagcgtacagtggggcggcaaggcgaccgaaggcaagtgggtagaccttgagctgccggaaaaggagccgctgccgatcgaccagtggatcgatgctgttgtaaacggcaagccgtctccgttcacgattgacgaggctgtgatgctgacccgtttgatggacggtgcttacaaggcatttgagaccggcgcaaaggcgacgttctgattttaattcttaaataaaaaaactctgagcacccgccgcgcgcatttccgtgtgcggcgggtcatttttagggcgaagcctgcggtatcgccttaacgtgtattggaaaccggagggtcattgtggaaaaagaaaaccattctgcagaaaagaaaccgatgcgggaatacaccccgtgggactatgtaaagcccggcattgccattgccgcctttgcagtggggctgattttcgtactgttcaagttcgatgcggtctcgaaggtgggcggcgtgctctttaacgcggtgagctcgtttattctgggcctttttatcgcgtacattttaaatgtgtttttgaatctgtttgagaacacggtgttcggaaggctcacacgcagtgacaacaaggtgtggaaaaagctgaagcgcccggtatgcgtggcgctttcctatgcggtgatcgtgctcatcctcctcgccatcacgctgtatgttgtgccggagattttcaagtctttagaacttatcggcgagacggcacgcgtgaatattccggtgtatgtagaccagattggcaaatgggcagacgagctttccaagcagtttgacttcgatttttccacgatggtggattcgttgaataacttcaactggtcttcgattttatcgggcgcaacggagtttacgacgaactttttcagctcgcttgtgaacgtgaccgtgaatgtggcgagcggcattttcacgtttgtgctctccgttatcttctccgcatacttcctgacgagcaaggagagcctgctgctttccttaaagcgtgtctcctattccctgctgccgaaaaaggtggtggcaacgctggcagatattgcggtaacctcgaacaacgtgttttcttcctttgtgcgtggccagctgacggagtgtgtcattttaggctgcctgtgcttcatctgcatgtcgcttatcgggtttgactacgcgctgctcatctcgtgcattgtgacgatcactgcgttgataccgattctcggtgcgtacatcggctgcggcatcggcgcgtttttgctgctgatcgtaaaccccatggatgctgtatggttcgtcatcttcttcatctgccttcagcagtttgagggcaacctcatttacccgaaggttgtgggctcgaccatcggcctgccgggcgtgtgggtgatgaccgccgtgacaatcttcagcaatttgttcggcattttgggcattattctcggcacaccgattgcagcggttctatacacggtgatgcgccgcgtgacaacgaaccgccttgcggcgcgcgggctttcaaacgccgatttagaaccgggcaaatacccatatctggaaaactctcactacgcgtcggggtattctaagggccgcccgctgtgtgcccccgtcttggaacgcgcggcaaagaaaaaggaacagggtaaaaagccgctgttcctgaagtttaaaacgagcaagaaaaagtgatttttcggcgctgtacgggaactcgtacggcgctttttatatgccaaaaggcatacggcaaagcgtttttcgcttaccgtatgccttttggtttgcggaaattaaagcgctgcgatgacttccacttcgacgaggacgttcttcggcagggtcttgacggcaacgcaggagcgtgccggcttttcggtgaaatacttgccgtagacagcgttgaacgcggcgaaatcgcccatatcggcgaggaagcaggtagtcttcacggcgttttcaaacgtggtaccggcttcttcgaggacggcggcgagattcttcatgacctgctctgcctgctcggtgatgtctgcaccgtggatgtcgcccgttgcggggtcgatcggaatctgaccggaggtgaagagcatattgccgcaaacgatggcctgcgaatacgggccgatggctgcgggggctttctttgtatcgattttcttcagcatgatataacttcctttcgtcacacggcatcacgccgcgtttatattcatcatagcgattttttgcgttttcgtcaagttttgctttttactcggcgagggcgtagaatgcttcgctgtatttttcggaatcgtccgccatgatgagcaggacaaggtcgccgacgctttccacgcgcacgtcgttcgggttgacatccacgcagatccacttggcggggttcgcgctgcggcggatctccgctttcaactcatcgatgtcggtaccgtccttgacacgcatgaggcaaacggaaaacgcgatggcattgatgaacggctcgctcgcgacggcttcttcaaaatcgaggttttcgacgccgaagtaatacgcagactggtctttcggaatctcgaccgtgccgacgctgtttttgagaaaatcgcgctgctcgtcatcgacatctacggtgtcatacaggcggtctataatctccggcagcgtgcccgagatggttttgccgctgtctgttgtgctgtttccgctgccgcaggcggcgcaggtgaaaagcagtgtgagcgcgagcaggagcgccgtaagctttttgggttttctcatggtaaatttcctttccggttttaaaatcgaaggggaagtttagtattttgtggcgtagtagtcgatggcttcatcgatggtgccgtcaaacacgatctttccgtttttcatcacgacaccgcgggtgcagaacgctttggcaatctccggcgaatgggtgacgaacagaagcgtgatgtcgccctgcatgatctccttcacctttttggtgcacttatcgcggaacgcgcggtcgccgacggacagcgcctcatcgacgatgaggatttccgggttgatgttgacgcagatggaaaagccgagacgcgctttcataccgctggagtacgtgcgcacaggctggtcaatgtattcttcgagctccgcaaaatcaatgatggcaggctcgagctttgcgatgtcttcatcgttaaggcccaaaatgcggcctttgaggtaaatgttttcgcgaccggtaaattcctggtcaaagccgcttgtgagctccagaagcgcgctgacgacgccgttgacgtaaatttcgccgcttgtggggaacgtgacgccggtgatcattttaagcatggtggatttgcccgcgccgttgcgtcctaaaatggcgacggcttcgccgcgctcgacggtgaggttcatatcgacgacggcgtgctttgttttgtgcggcacacttttgaaaaacagccccaaaaggcgacggcggctgcttgtatacagtctgtacgttttgcagacatttttaaaacggatggcaatgttgttttgttcgctcatgcttttgccctccttacagtacgtccgccatttcgctgcgggtgcggcggtagctccagatgccgagtgcgtaaatgacgacgagccagacggcgaaatacaaaaggcgcttcggctggtcaaagaaccacgtgtggtaaatgaagcagttgcggtagccgttgcacaggaacgtgacgggattcagcatcaaaagcttatgtgcgaggcccttgtgcatggtatcaacctggaaaagcacgccggaaagccagaacaccgctgtaacgaacgatttgacgaggtttgagaaatcggtgctgatggcggcgatgggcgcggcaaacatagcccagccggtgaagaacaggaaattgcacagcatgtaaaacggcagctgcacaaggtagatggtcaattcgttgccggtgataacgaagatgagaatggtgatcaccatcaagatgaggtgcacagagaatttggagatgctggtaaacgtcggaatggtggagaccgggtatttcatcttggtgacgagatagcggtttcgcaaaatacactcggtgccaagcgtgagcatttcgctcatataaaaccacggcacgatgccgctgatgagccacagcacgaacgggtagccctcgatatcgccgccgcggcgcaggccgatggcaaatgcgaaccagtaaacgaaaatcgtgacaagcggcttgatgatggcccaagaccaaccgagtgcggacgcacggtatgtgcggcgcaggtcggagcccgcaagcttaaagatctgttttcggtaatcaatgtgatcccgaacgatggtgacgatggtttcacccaccgaaggtctggtggatttgatttcaaaagatgaggccatacaggccgcacctcctttcccgcgcagcgcgcgtacctaaaaaggcattccgaaaatatggtgaataggataggcttactgcccggccttcttccagtccgcaggcagtatcgcttttgctattatacacgttttgcaggaaaaatcaaccgttttcgacacgcggcgcggcgatgcacacggcatccttgacacagcggatgacggtatcgatgccgcctgcggcgtattcgccgtcgattgaccaatcaaagcccgctgcggcatgcaggcggaacgtactcgcggaagcgaaatcgatgtgcttgtccgaaaaatcgttgtttttgagcgccagaatgaggcggtgcaggtcagggagcgtttccggcttgcgaatgagaagcatctcgagcttgccgtcgttcatatcgacgctgttttcatcgtatttcagcatgccgccgatggaaagcgagttgctgaacgcgccgaaaatgtacgcgccctcgaaaaatttgccgtctgccgtgacggtgaggggcgtggcgtcgagcgcgtggaggtccttcataccctctaagacatacgcgaagtggcccaaaaggcgcttcatggtgcgcggcgtggcgtaggagcactttgtaaataagccgaacgacgcgacataggaaaaatagccgtcgccgaatttgccggcatcaatgaggcggtcttctgtttccgtaaagctcttataaggatctaaaagatgcttttgaatgccgagcgtctgggcaaaatcgtttgtggtaccggcgggcagatatgtgatgggcgtgcgcagcgcgcggtgcagcatgccgtttaagacggcgtttaatgtgccgtcgccgccgagcacgacgacgcgggcatagtcgttttctgcgagctttgcggtgtagccgcttccgttttccgtttcggtcgtttcaaagcggtcaacagcggcgccgttttctttcagccatgcttcaagcgtatcggcggtatgctcgccgccgatacggccggaaacggggttgacgatcattaaaatgtgcgcgccgcgtaccggctcgtattccaaatttttatccatttctctcaccctttacgcacaaatttattcataaacattatacgcaaatacgggggaaaaacggtgaacaaaatttgaatttagaacacacaaacatagaaaaaacgccgccatacgggaaaaagccgtacagcggcgcttatgtgtctattcggtttaaaatcagcccttgagctctacgcggcggattttgccgctgatggtcttcggcagctcatcgcggaactcaacgatacgcgggtatttgtacggtgcggtgttcgtcttgacgtaggtctgaatctcttttttcagcgcttctgtgccctgcgtgccctttgtgagcacgatggacgccttgacgacctgcccgcgaatgggatccggagcgctggtgacggcacattcgagcacatacggcagctccatgatgacggattcgatctcgaacggcccgatgcggtaaccggacgacttgatgacatcgtctgttctgccgacatagaagaagtagccgtcttcatcgcgccatgcggtatcgccggtgtgatatacgccgccgctccacgcttcgcgggtcttctcttcgtcgcggtaatagcccatgaagaggccgcagggcgtgtgcttatcggtacggatgacgatctcgcccgtttcgccgaccggcgcaggcgtgccgtccggcagaatgaggtcgacatcgtaaagcgggctcgggatgcccatggagccgcttttcggcacagagccgaccgggttgtaaatggaaagcgtggtctccgtctggccgaagccctcataaatggaaaggccggtggcgcgcttccattgctcgtagacttcggggttcagggcttcgcctgccgtggtactgtactcgatggaggaaaggtcgtatttggagaggtcttccttgatgaagaaacggtacatagtgggcggcgcacagaacgtggtaatattgtactgcttgaacatgggcaggatgtcgtgtgcatcgaacttatcaaaatcataggtaaaaatgggcgcttcacacatccactggccgtagagcttgccccacagcgccttgccccagccggtatccgaaatggtgaagtgcagcccctccgggttgacgttgtgccagtatttggcagtgatgtagtgtccgagtgcgtatttatagttgtgctctgcgatcttcgggtagcccgtggtgccggaggtgaagaacatgagcatgggatcgctgccgcaggcggtgtcctctgtacgctcaaacacgtcgctctgctttgcaacctcggcgtcgaaatcgagccagccctcgcgtgcgccgtttgccatcatcaaaaattcgacggtgccgcagtttttggcggcgcgcagggcttcatctgcgacctgaccgtccggcgtgcagacaagcgcgcgcacgcctgcggccttgaagcggtaatcgaggtcgtgctccattaaaaggttcgtcgccgggatgacgacggcgccgagtttatgcagcgccaaaatggcgaaccagaactggtagtggcgctttaagatgagcatgactctatcgccgcgcttaatgccgagggacttgaagtagtttgccgtcttattcgacatgcgcttcatatcattaaacgtgaagcgcttttcctcgtggtgcttggagacccagagcatcgcaagcttatccggctctttttccgccattttatcgacgatgtcgaacgcgaagttaaacttttcctcattcatgaaatcgatggattttaagatgccgttttcgtcaagctcggtgtgcacgaacgggcttgcgaccgtttcgtggtcggcacggtcctgtttggccttgatgagcgcctcaaacgtgtccttttcgggctttttctccttctgcgggcgcatgacgacggcgtagagggtacattcctcgccaccgacggcgatcatgccgtggggcgtgccgctgttgtagtaaatggaatcaccctcgccgagttcttcgatgtgcgagccgatctgcatgcgcattttgcccttgatgacgatgtccatttcctgcccctgatgggtggaaagcttgatcgcaaccttctgctccgcctcgttatacggcatggtgacaaaaaagggctctgccgttttacccttaaagagcggggcaagatttaaatacttaaagccctggcggcgcgtaatgggcaggccctcgccgcggcgggtgacggtatatgtggaaagacgcgggcttgtgcccttgatgaggtcggtggggtcgataccgaagcgctctgcacatttaaaaataaacgtgaagctgaaatcatgctcgccgctttcaaagccgcgatattcctccagcgtgacgccggtgcgctgcgccatttcttcttcggaaaggccgatgatctcgcgcatggtgcgaatgcgctccgccacctctgcgagctgtgctttcaggtctgttttttccgttacgggggtttgtgcttcatttgccaatttcttcattcctttcgttttggtatggctatatcgatagttttggtgtttttcatgcaaaaaactccgtctcaaatcgctttgagacggagttgatccgcggtaccactcaaattgcctgaaaaggccactcacgggctcccatgaagccctatgcactgacgcagcatggcgcggaaagccctactcgggttcactttggggctttcagctcggaagggattgtgacagggcttttcgtatcggcttacacccgccgccgactctctgaaacgggaaagcccgcactgtcttcgtcatcgcttttatatattctctgtattatatgaggtatatctgaaaagacaaaacttgtttttagacatattcttatcttatctggttttcatttcaatgtcaattgttttttcaaaaatttcaaaaagcttcacacttttgcggtctcacgcatttcgcgcataacttactccctcaaaatgtgaaataaataataaaaaccggataaatacaggcattgcagcccacattttatccggctttctgtttcgtgtgaacgggtcgccctccgataaacatttaacggtttatctttgaactaccttattttaataaaatgaaaatatcaatgacactttacgcgcgatgtgcggcttctacggcgtcagcggcgttatcgagaaggccgtcacccatgagctcaatggcaccgcgatcgcacagggaggcgatctgcgggtcaagcggaagcttatcgagcaccttgaggtcgtactttgccgcgacctcgtcgatgtggctttcgccgtaaaccttgaacggctcgccgcagcacgggcacttgacatagctgtaattttcgatgagaccgagcacgggcacgttcatcatttttgccatttcgaccgctttggagacgatcatggagacgagctcctgcggggaggtaacgatgatgatgccgtcgagcggaatggactggaacaccgtgagcggtgcgtcgccggttccggggggcaggtcgacaaacatgtaatcgacttcattccagatgacgtcgctccagaactgcttgatgacaccggcgatgaccgggccgcgccagacgaccggggaggtctcatccggcaaaagctcgttgatgctcatggtctcgatgccggtctttgtgttgaccgggaacaggccgtcatcgctgcccatggccttttcgtggatgccgaagcacttcgggatagacgggccggtgatgtcggcgtcgagaatggcggttttaaagccgcggcgctgcatggtaacagccagcatagaggtgacaaggcttttacctacgccgcctttgccgctgacaacgccgatgacctttttgacattgctcatcttattcatgggcgcaagaaagctttccggattctggcgggaaggacattcctcgccgcagctggagcagtcgtgcgtacaattttcgctcattgctgatacttcctctcaaaaataatgtcttttttcgtttgtgcggtaagctattccgccgcatcaaacaggatatttcggtctttttattctaccctgttcttccgcttttgtcaagattttgacaagctatgaaactgcacagttaagctattcgtgcgtatcgttcgcaacggtgggcgttaaaaacaacagaagaaacgcgagcaccaaaatgccgcagaaaataaagatggtttttcggaatgaaaatttttcccgtacctcggtttttgacttcaagatacgggaaattttaatttcaggcttcgtcaaataatttttcaaagcgaacggcggcggtgtgcaggtctttcatgccctcaaacacgttttccgcgttgaacttttctttgaggtaataatcggcctccagcgtgaaccagcctttgtaaccgatctctttgagcgcggcggcgatgggcgcgaaatcaatggacatggagaacgggatctggtgggaatcgtgccaacgatcattatcgtgaatgtgaagcgcctgcaggcggtggcccagcgcacggatcatgttcgccgcgcctgaaccggagccgcgcatttccgcgtggccgatgtcgagacatgcgacgagatacgggtcatttacggcgtcgatatgctcgatgaagctctctgaggtggcgcatgccgcaaagcaggactcgtctttcgcatcatcccagttccacatattttccgtggcgatcttcacgccgcaatccttcgcaaacggcaacagttcaagatacatttcggcattttctgcggcggatttgtcgttatccgggtgaatgatgcagatcttgccgccggcttctgccgtgcattcaatcgcgcgcttgaaatacgagcgaatctccgggcaggatgtcgggaacggcgcgtgcgactggttgcaggtgatgccgttatcgaggccgatctgcttcagcttgcgcgcaaacgcgagataattttccccggcaagcggatgtgttgtggggcggactgcgccgagtcgccaatcgtaatcgcacatggcaaacatggaaaaatcccaggcgtcaaacccggcttttgcgacgtattccacggctttttcttcgccgaccagaacagacgcggtttcgatctgtgtggatgttctcatgaaaactcctcccttttaccgccattatagagccgaataaggggcttgtcaagccagtctttcggcgtttggtttgtggaaaaagccgaaagcactgtacaaagcgacacaaaaacgaccgcccgatttagaaccgagcagccgttcatagagtttgcttaataattttccgcgtgaacctcaaaatagctctgcggatggttgcagaccggacatatctccggcgctttgacgccgacgcagatatgaccgcagttgcggcactcccacacttttacctcgctcttttcaaaaacatgtgcagtctctaaatttttgagcagcgcacggtagcgctcttcgtggtgcttttcgatctcgccgaccattctgaattttgcggcaagctccgggaagccttcctcttcggcggtttttgcaaaaccctcatacatatcggtccactcgtagttttcgccgtccgcagcggccccgagatttgcttttgtatcgccgatgcccatgagctccttgaaccacatttttgcgtgttctttttcgttatcggctgtcttcaggaagagtgcagctatctgctcgtagccctcttttttcgcgacagatgcgaaataggtgtacttatttctcgcctgcgactcgccggagaaggcctcttgcagatttttctcggttttggtgcctgtatacttgtttgccatagaaatacctcctatgtccattaaaatcaatttcgccctaaggcgaccttacattcttaagtatagcgcattttttgaaaaaaataaatgattttaaaccatataaaaaataaaaagcactcagcaatacgctaagtgcttttatctggctccccctgttggactcgaaccaacgaccctgcggttaacagccgcatgctctaccaactgagctaaggaggaatattttggtgacccgtgcgggaatcgaacccacgttaacggcgtgagaggccgctgtcttaaccgcttgaccaacgggccacaaaaaccaagagttgtggctcttggtcagcttctggtgcaccatcagggactcgaacccgggacaccctgattaagagtcaggtgctctaccaactgagctaatggtgcatataccctgaaaactgaataaagggagaagcaagagttcaatgggagaagaaagcgcaatcttgaaccaagaaggatta

SEQ ID NO: 1694 - DNA, 613 bp, Unknown
  gut microbiota DNA sequence
ttctgcacctatgatctggctgaattttttgaatgggctgctccatgcggaggacatccccaccttgcaggagttcatcggctactgcctgattccctccaacaaaggtcagcgcatgatggtgattaaaggcaacggcggcgagggcaaatcccaaattggtgctgtgctttcggctatctttggcacgaatatgaaagacggaagcatcggcaagatttctgaaaaccgcttcgcccgtgctgatctggaacacatcctgctgtgcgtggatgatgatatgcggatggaagctctgcgccagaccaactatgtaaaatccatcgtgacggcacaggggcaagatggatctggaacgcaagggcaagcagagttatcagggctggatgtttgctcggctacttgcgttcagtaacagtgatctgcaagctctgtatgaccacagcgatggtttttaccgtagacagcttgtgctgaccaccaaagaaaagcctgttgacagggctgacgatcctgaccttgcagagaagattaaagccgaagccgagggcatcttcctgtgggcatttgaaggcttgcagcggcttgttgccaacaactttcagtttacgga

SEQ ID NO: 1695 - DNA, 343805 bp, Unknown
  gut microbiota DNA sequence
aaagctaaagggcttgccgcctgcaattcacagacggcaagccctttcggctgcttgaacaatttttacttcagaatattatctaactttttggggtcacttcaatgcgccgggctgcttttttcatacctaaaattacgcgacggctgcggaaaagccgggaagaccgatctgcaaaaggcgcagggctaccgggatttccgagcgagctctgcgcctttttattttcagaaaaatagcaccccgggccgaaggatgggtgaccgcggggcgcttgacagatttacaattgaattatataaaaccgcaaaggaaatgtcaatagaaaatttgaaaaaatgtggatatttttcatgtttttaacctgcttttaacgtattcttttcttttacctttgcagaagtctattgcaaaccgacacgcatcgtggtacaatcggcttaaagaagtacgtggagaagattttgtcgtgaacatgaaaacaatcggttccgccgttgtaatcatcttggccgccatagtcgggctattcctcggcgctgccatgaacgacgggttaagcggctccatactgctcgcggtcatcgcagggttcgtctgtgtgatctatacgattgaaaacagtggcaagaagtaggggattttttatgattttacggtttaaacagcgctttttttcatggttcgacagctacgatatttacgatgagaacggcaacacggtgtatgtcgtcaaagggcagctctcctggggacactgcctgaaaatttttgacgcttacggtgaagagatcggcacggtaaaagaacgcatcttcacgttcatgccgaaattcgagatgtattttaaaaaccaatatgtcggttgcatcagccgcgaatttgcactttttaagccgaaatacaacgtagaatgcaacggctggcatgtggagggcaacgttttggagtgggattataccgttgtttccggaagcggtcacgatgtggcaagcatctccaaagagctgttcaactggacggacacgtaccttttgaacatatacgaccccgcagacgcactgtgcgttttgatgatcgtgcttgcaatcgacgccgaaaagtgcagccgaaataacggctaaacgctattttcccaaaatttaaaatgcgtagaacaaaatgccgagaccggcggaaagcacgatcatcaaaatgggcgagggtgctttctttttaaagtgcttatagccaaagtgcaaagtaatcagcagcagcaaaatcacaacaccgcgcagatcaacctcgggggcgcttcgtatggtcgtaaagctgaatagcgtgctgagacccatcgtcagcgccgtagccaaaatgagcgccaccacgcacggacgcacgccagagagaaacgcctgcacaccgacgtatttcagcagattactcaacactgccgcaatgagcaaaataatgacgaacgaggggagcaccacgcccaaagtcgcgagcagactgcccaacacgccgccttgcgaagagccgatgaacgtcgccatgttgacggcaagcgggccgggggtcgattcggacaccgcaatgaagttgatgaactcgctttccgtgagccagtgattcgagagcacggcttcgcggatgagggagatcatgccgtagccgccgccgaacgacactgcgccgatctcaaggaaggtcaggaataatttaaaatagatcatttcacgtcaccaccttttccacgcaggcgctgtatgaaataggccgcaagaccaaccgcaccgctaagcaaaataaagtagatagacgaaaacgaaaccgagaaaacggaaaacgctatcatgcagaccgctacgcctgtgacaagcacggtattgaatgccgtcttttcaagacttttcagcatgcgcacaccggcggaaaagatgaggtacacaacgcacacctgaattccgcggaacgcgcaggaaacgaatttcaagctcaaaaactggtcaaagaatagggaaatgaggtagatgatgacaaacgaagggatacacaccccaagcgtggccgtcgccgcgccgggcacaccggcaatgtgataaccgatatacgttgcgctgttaatagctatcgggcccggtgtagactccgcaatcgcgatcatgtcgaggaactcttttttatcaatccactttttctttgcgataaattcattttccagcaaggcaaccatcgcatagccgccgccgaacgtgaaagcgccgatcttcaaaaatgtgaagaacagcgtgcatagttttttcatttttcaaccccattttctgctaatttaaacacgataatcatacaccgtttcaccgaaaaaagcaataaaaaggaagcaggagcactttcgatgtgttcctgcttcctttgctttattttaaattacttagagaagaggtttgccacacggttccagaagctgtctttggtttcagtctcggtcgtggtttcttccgtggtgctcgtgctgttgctgctcgagtccgttgcggtgcgcattacgtagcttacggtcatatccgtaccgtctgcgcggccggatcccttgaagctgtccgcacgatccttcatgatgtcaatcacgcgtgccagcgtagaatccgggtcggtaatttcgctgaggccgtcgagcttatcattgattgtatcggagaactccgtcatgccgtcgctgagttcagacgtgccgtctttaagttctgcgccgccggtctggaactgaccgatcgcattcgatacggtcttgctggaggaagagagcgtctccatgccactgagcagttggttggtgcctgcatcgagcgtgcctacgccggttgcgaatgcagaggtgccggttgcaagctgagaagcaccgctgccaagctttgcagcaccgtcggaaatcgcgttggccgcaccgacaaccgtgtcggtatctgccggattctctgcgttatacagcgcgccggtcagcgtatcaacactgtccatcatttcgcctgcctgcgaggagaggtctttgaattcacccatcaaactcttgagctcatcggtgttaatgtccggaattgccgctgcaacctgctgcacagcgctctgctttgccgccgcaagtttctcggaagtagttactttttccgtaacagccggggcaacctgttcagcaaccttcgggccgacagtgcttgcaatcgtatccgaatcaatatcgtttacaacctgacccattgccgtttttacagcaactgttgctgcgccggaaagttttgctgtaactgtatcggtaatttcgctactcggggaagccggagcatcgatttttgctgaaattgcatttatttgatcctcagtaaggcctaaactcgaatcacttaaaagttctttgagtgccgtcttataaccgccttggaatacatcggtcgaaagtgcagctgcctgatctgctacctgatctgcgccgactgccgcattatcggccgcttgctgaacgttgcctttgattacttccgccgtcttctgagaagcaactgttgccgcattgcttgcagcagcttcggaagccgctttcgctgcgccgctcgccgcgccatcgaaaacctgttcagcgcctgcgccgagctgtgctttgagtgctgtcatatccgggatttcaacggtctccagcttaccggaaagctcggccattttgtcttcaagcgcggtcttcttttcggaagcctctacaaggcccgggacaagctgctgattcatgacgcccgcaagctgtgcggtactgctctgcagctgaatagcgccgagggaaagctcgccggtctttgttgccaagagctgtgcgttttcaagcaggttttccgtgccgtttgcaagggtctgtgtgccgttcaaagcgctgtccacgccggcatcgaactggctgtaactcgaagcaaacgtgtcaaggctttcgacaagtgtgcccacagcgtcatccaatgcgccggaaccatccttcagctgatcgattgcatcggtcagttcatccatcgtgtcgccaagctcgtcggaaacctcatcgaggtcgaggtcggaaaggctaggagccgcggcgaagagaaacgtcgggacggtgcagtccgtaacatccgcttcgagggtaagggtatcgagcatcaggtcgtcaagcttatcaaagctgtcggggagcaggtcgctgacggcttccttcatgcccggcatcgcaaggtagcaggcaacctgtgttttggaatcagactccacaagaccgtgctctgtcgtgatgttcttgaagttttcgctcggcagcacagccgctgcaacggtgaaaaacggggtatagacggtgcgctttttaccgtttacggtcacttcttcgccggtgttgttcgtcagcttaacagttgcgacaaggtggccgctctgacctttgagttcatcggccgtaaccgccttgccgtccagcgtatactcgatggaaacaccgaccggcgcctgtgtgctgttcttgccctgataataaatatcggtttcgtccgtcgtccacttgagcgtattgccggactgttccggcatcacgtcgctcttgaggttctggatatcggaaaggtcgctttcgtcggtaacggcgtcaaaaccgtcatcgctgtgcagccaatcgctggtgatctgctcctgcacggaaccgtctgcgttcaggatgagataagaggtttcttttttctcaacggtagcatccgccgcgaaggccggggcagcgcagccgaggaggagaagtgcggaaatcgtagccgcaacggattttgtaagatacttactcatattgatcgagatcctttctctgaatcgattatgcctttttctcggtgatttcgggctttttcagccaatggaacgtggtctttctgaggattggctccgtaatgacgagcagtgccggcaacacaagcaggataactgccatactgatgagtgcgccgcggctgatgagcttgcacaacacgccgatgagctccatacgggagacgagggacacgctgaacgttgccgcgaagaaggtgagaccgcttgttaaaatactctgactgcactgttcaacggcaatttgagccgcttcctttgcagtgtgacccgcgttacgctcttcgcggaaacgcgtggtcatgaggattgcatagtcgaccgttgcaccaagctgaatggtgccgataacgatgcttgtgataaacggcagcgtcgtgccggtgaagtacggaatgccgaggttgatcatgatggcgctttcaatcgccgcaacgagcagcaccggaacagaagcggagcggaacacgatggcgataatgacgaacacgacgatgatacttgtgatgttgacgttattgaagtcgacatctgcaacctcgatcaaatctttcgtcatcgcgccttcgccggtgatgacgccgttcggatcgtactttttcacaatatcgatcatttcggagagctggttattttgctcgtcactgccgctcttataagaggagtttgcaaggatcatcttgtggccgccggcctcgaagatgtctcgcacgtcgtcaggaataaacatttccgggatcgcgccgccgacgaatttttcatagctcaaaacctggtgaatgccgtccacgccgctcaactcatcggaaagatcggagaggcttttttcggaaagggtatcgtccacaatgatgaagtgggacgttgtcatatcgaagtcttccttcaagcggttcgtacccgcaatgccgggaagatcctgcggaagcgcatcaaagatcgtgtaataaacggaagtctttgattgtgcaatgaagaacggaatgaagattatgataaacgcaatcaaaatcggcacacggtgcttcacgacgaagttcgaggtacgcttgagcttcgggataaacgtgcggtgcgtgtgcttttcaatggcacgacgaaacgtcatgataagagacggtaaaaccgtgatggtgcagataacgccgagcagaacaccctttgccatgacaacgccgatgtcttcgccgagcgtaagctgcatggtgcacatggcaaggaagcccgcaatcgttgtaagagagctgccggtaatggaggaaaacgtctttttaatagccgccaccatggcgtcctcatcggatgccgccgtcagcttttcttcttcgtaacggtgcaacaggaagatggagaagtccatcgtaacaccgagctgcaggaccgttgccaatgcttccgtaatatagctgatctggccgaggaagatgttcgtgccgaagttataggcaatcgggaacagcataccgagcatgaagatgagcggcacaatcgtttctttcaggctgaggaacagaatcagcaacgaagcgcccacagcgcaaaggatatacaagggcatttctttattgacaaggctcttggtatcttccaaaatagccgacataccaccgatgaagcaatctttattcaagatgttcttgatttgcttctgcgcgttcatcgttctggcatctgcgctcggggcatcgaactgaacgatgagcatcgttgcgccggaatcgttatagaagaacttctgaatatcgctcggaagcatttccttcggcgtcgtcacgtcgataaaatcgctcgtccacatgaccttctgtacgccttcgaccccttcaagatcgcttttcagttttaaggtatcaggcgtagacatgttttcaaccgtaatcatggaaaccgatgccatattgaagtcatcctccaaatacgtctcgccgatcatggaatccagatctttcggcaggtaggtcaaaatatcgtagttaatgtaggtgccgagcgcaccgaacaccgaggggatcaaaagcagaaccgctaaaacaagaatcagctttctgcgcttcacgatccatcgtgcaaagtgctccatttagcaccgctcctttcattcgggaaccatcccgtttatttcgttatgtagtttagtccaaaaatgaccaatagtcaatattaaaaacgacgaactgcgctgacaaaataaattgactattagtcattttattcaaatctgtacaaaatgttgtttttggcttgctttttacggtgtatccgccttatactataagacaaataaagtgattacacagttagatttgaatgttgggaggccacagccatgcgcggcggtgttgaacagaaaaaagaacagaaaaaggaggggctgctcgaggcggcatatcagcttttccttgaaaagggcgttaacaagacctcggtcgatgagatcgtaaagaaagcgaacgtcgcaaagggtacgttttatctgtattttcacgataaaacccagcttctgcagcagctcacataccgcatttccgcgcgtgttttgagtgaggcctatgaatatgcggaagagcataagaccggcgtttttgtagaagacatcatcctcatggtcgattacatcgtggaatactttaaaaggagccgtctaacactgcggcttttggagcgcaatttctcctggccgatgattgaaaagcagcttgatctaagagaagacccgttgtgggacaagcttgtcactgccattgagagcagctcgctcgccgtgggctgcacagaagatgttttatataagcgcgtgtttttggtggttgagctcatcggttccacttgctttgccacgatgattgaaaataagccggatacaatagacaacatgaagcccgtgctttacgacatggtgcgtaagatgcttgcgtaatgtaaagcgtatcgactttgcaaagttgagctgctttgtaaagttatattaacttacacataaacctcccggggctggtttaaagatcgccccgggaattttctatgttcgattgaactttttcgcaagatatagtaaaatagaaatcgaaaaatgagaaaacacagaaccaacagaacggagatcatttgaacctatggataaatcggaaattcttgcactgcgccgcgcagtgctggaaaaagactttgcgcgcatgaatgaccgccaaaagcaagccgtgttcaccgtaaacggcccgctgctcattttggcaggcgcaggcagcggaaaaacaacggtgctcatcaaccgcatcgcgaatatcctgcgctacggcgacgcgtacaacagcacctatctgcgtgacgatctcgatgaaaatgatattgccgcgtgcaaagcttatattgaaaacggcacgccgttcacaacggaatcgcaggagcatttgagtgtttctgcctgcgcgccgtggcgcatcatggctattacctttacaaataaggctgcaggcgagctgaaagaccgcctgtgcgccatgctgggcgagaccgccaacgacatttgggcatcgacgttccactccacctgcgcgcgtattttgcgccgtgacggcgagcgcatcgggtattcctcgcactttacggtgtacgataccgacgaccagcgccgcttgatgaaaagcatcttaaaagagctcggcatttcggaaaaaaacatcacgtcaaaatcgattttgaacgagatttcccgggcaaaggattctttaatctcgcctgctgagtacgccctcacggtcggcgacgatttcagattaaagattatctcccgcgcgtatacaacgtaccaaaagcgtttggaagacgccgatgctatggactttgacgacctcatcaacaaagtagtggagctcttcaaaaagtgcccggacgttctggaacgctaccagaaccgtttctactacctaatggttgacgagtatcaggacacaaaccatgcgcagtacacatttgtgcgcatgctggccgaaaaaagcggtaacctctgcgtggtcggcgacgacgaccagagcatctacaaattccgcggtgcgacgattgaaaatattctgagctttgaaaatacgtttcagaatgcgacggtcattcgtttggagcagaattatcgctcgacgcagaacattctggacgccgcgaacgccgtcattgagcataacaccgagcgaaaaggcaaaacgctgtggacgcagaatggcaccggcgccatgattcacctgcacacggcggaaaacgaaacggatgaagccgagcgcatcacgaagatcatcttagacggcgttgctgcggggcggaaattctctgattatgctgttttgtaccgcatgaactcacagtcgctgacatttgaacgcaattttgcaaagtccggcgtaccgcatagaattataggcggcacgcgcttctacgagcgccgtgagatccgcgagatgatcgcgtacctcagcgtcatcaacaacccgagcgacgaaatgcgtctgcgccgcatcatcaacacgccgaagcgcagcattggcgaccgctcggtcgaagtcgcggcgcagatcggtcagcagacgggggagacgctgtttgaggtcatctcgcacgcaaaagactatcccgcactgtcccgtgccgcaaacaaaatgacgcttttcgccgcacagatgcagggactcatcgagctcaacaacgacgaagaagtcacgctcggcgagctttatgacgagcttgtggagcgcatcgattacctgaattttcttaagaccgatgacccggaatccgcagaagaccgcgccgcgaacgtgcaggagcttgcttccaacctgcgccgttttgaggaggagaaccccgaaggcacgctttcggattttctcgaagaagtttcgctcatcacggacatcgataattacgataataacgccgattccgtcgtgctcatgacggtgcactccgcaaaaggtctcgaattcccggtggtgttcctgccgggcatggaggaaaacattttcccgggcatggcgagcgtatatgtaccgtccgaagtggaggaggaacgccgtttagcgtatgttgccatcacgcgtgcaaaagaggagctgtacattttccacgcggaatcccgcatgatcttcggcatgacgaaccgcaaccgcgtttcacgctttgtggaagaaatcccggagacgctcgtcgagcacacccgctcccgcgattacagcgcgcgcccggtctctatgccaagcttcggcggcgcgaagccgttcggggaagcaccgaaaacaaaatccgttgcggaagccggcggattcacgccgaagccgcgcgtaaagcccgcgcctgccggtacataccgcgtaggcgatactgtcctgcacaaggcgttcggcacgggtctcatcgtttccgccacgccgatggcgaacgatacgctgctcgaagtcgcgtttgacaaagtcggcaccaaaaagctgtttgcaaacttcgcaagactgacaaaagtataaaaagagtaagccgtgcacccgttttcaaagtgcacggcttatattattcaaatgcggttctaattttgtctgccgcagccacagccgcagtcgctcgctttcggcgggaaaaattcgtcggtcgggaaatcaatcttgcggaacagttcgcaggggttgtcgccggaagtgacgcattccttatccggaatgcagaaatcaaacgcgggaatgagcatctgcacattccgcacaatctgcacgatggtaaacaggccgatcgtcacgtatacggtgtttttctgctctaccgtttcaaacgcgccgccgtaacggcttgcaatgcagtctgggatcacgcagcagggctcgcagccgcagcggcagtgctcgcaaagcttcgcggaaagcgccactggctgcgcgacctgcacagtcgccttgggtaagaccttattgccctgtaaatcggcttcgtcacggcagctctcgcttgtaaacatcttcacgttgccctcactgccgtagagaatgaccttcttattgaaaattgaaataccgctcacgcgttcgcagcccactgtcgcgccgccgtacagctccaaagatacgtcaaagaaaaacgtgagatcaatggaataatacccgcggttaaaggggatcggctgcatatcaatgtacacagagattacatcaacgtcccgcacccgcacattagcggaagcgtccacaacgggctgcaccgaggcgggaaacagcacacgtaaatcctctaagcagtctttatctgaacaggaatcgtaaatgcgcatggcatctatgcagacggcttcttttaacgctgcgccgttttcgcaatcgggtgtccgctcattttcagccatatttgtaaacctcctttgtggtttctcaatgccattgtacggaaaagggcgggtattgtgcctgtcccgccgctttgctcggttttttcgcattgtaagaaatttttcagttgtatatttcgccgcagtttgctataatgaataggaatgtaccgcgctgcggtgcaaaaagtcggcaaaggccggcaaatttacgcagaaagcagtaaatgaaacttatggcattgattgtaattgaagggctggacggcagcggcaaaggcacgcaggcaaagcttttgtatgattacgccttatcgcgcggccgcgcacggcaggtaacgttcccggattatgactctccgtcttcatcgcttgtaaaaatgtatctgaaaggcgatttcggaaaagaggcgggagacgtgaacgcctacgccgcaagcgcattttacgccgtggatcgctttgcaagctaccgcatgaagtggaaagacgattatgcaagcggtgtgccgatcatctccgaccgctatgtgacgtccaatattgtatatcaattaagtaagctgccaaaaacggagtggaaagcgttcgtttcgtggcttgaagacctggaatatgaaaaattcgggctgccgagaccggatcgtgtgatttatctggatgtgccgccgaaaatttcccaaaggctgctcacagagcgctacgcaggcgacaccaccaaaaaagacattcacgaaagcgacatacattatctgctacattgcagggactgtgcactgtacgccgcagagcatttaaactggaccgtattaaactgcgccgagggcgataccctgcgtagcattgaagatattcatcacgagatcaaggaaaagctggaggatttattatgatctatgtatttcttgcaaacggatttgaagagatcgaagcgctcgcgcccgtggatattctgcgccgcgcagagcttgaagtaaagaccgtcggcgtcggcggcaaaacaatcaccggctcccacggcatcaccgtaacagctgacatcgaagaaaaagacgttacaacggacgatatggagctgatgatcctgcccggcggcatgcccggcacactgaacctcgaaaaatcgccgatcgtcacaacctgcgcggaatactgcgcaaagaacgacatttaccttgcggcaatctgcgctgcaccgagcgttctcggccatctcggcctcctgaacggtaaggaagccatctgcttcccgggctttgagggcgaattaaagggcgccacaatctccgaaaagccggtctgcgtagacggcaagatcgtcacggcaaaaggcatgggcgttgccgtgcaatttggcttgacgcttgctggtctcatggtcggcaaggacgttgaaaagaagatccatgacggcattcagtgcacggattgatgaccgatataaccgaaaaaaacgcactgcgccgaaaaatgcgtgcggcacgcaaagcctgcacggatcgcgctacacgggatgactgccttttgcagcggctcatggcactttcggtgtaccaaaaggcatcgtatgttttgagctacgtaagcttcggcacggaagcggatacgctcagaattctcgatcgtgtacttgcaaacggcaaagcgctttacgtaccgaaatgcgtgccaagcacgaaccgcatggtgttttaccgcatctcggctttacgcgatctttcgccgggcgcttacggcattttggagccgaaagaagcagaggcatatcaagatgaggcgaatgcactgtgccttgtgccgggactggcgttttcagcagacggcgcacggctcgggtacggcaaagggtactacgatacgttttttgcgcagcactcggttttaaagctcggcctatgctacgattttcagctcgtgccgcaagtgccgacgcagccgtatgatgtacgcatggacggtattttgaccgacaagcgactcgttttgacggcagatgaagaaaggatggaatgaaaatatgagtgataacggcaggcgctacgccccgaaggacgcgacaccgcgcagccagaattcgcgcgaattcaagctgaatctttccgaagatcagctcaatcacacagacgaactggaggacttgcagggctataccggcagccgcgcaccacagcgcgtggaagaaagctctgccggtgcacgctccgcccgtgcggaacgcaatcagaaaaaggaagcgaaggagcacaagaaaagaaaccgtgtaaaggccagaaaaaacaagcgcattttcgcgttcacgtggcttgccatggttattctggtctctttaaccctcgcttcgtacctgattggcggctccaacgattttctcggtgtagaccgcacagattccgaagtggaggtcacgattcccgaaaacgtgacgcaggaacagctgacagacattctttacaagagccacgcgatcgataagccggagtttttctcccttttctgcaaattcaccacggaaatggagtattttgaacccggcacgtatacgatcaaaacaaactacgattataagcagcttgtcaataccttacagtccggcccggatctcggcgaagagatcaccgtcatgttccgtgagggcatcacggtgcagcagcttgccgctttgctggaagaaaacggcctgcacactgcagacgagatccttgaagcttgcaattcttcggattacgacagctactcggatgttgcagccatcacgaacacaagtgaccgctactataagctcgagggctatctgttcccggatacgtaccagttctttgaaaacgatacagtagaatcgatccttgaccgcttcctcaataactttgaaaataagctcaccgacgaaatgcgcgatgacattgcgaaatccggctataccacggatcagatcatcacgctcgcttccatcattcaggcagaggctgcagatacaaaagatatgtataaagtttccgctgttttgcacaaccgactggaaaacggcgcggagcatgacatccacacgctggactgcgactccacagtttattatccgtacaaaacggcaaatgacgcgccggagggctttgtaagctcgtactccacgtatgacaacaacggcctgccggcaggcccgatctgcaacccgggtcttgatgccattatggcggcaatctatccatcaaccagtgatgattgtcgtaatgcctattatttctgtcatgacagcaatggtaaggcttactacgcttccacgatggatgatcatttgatgaacatggcggaagccggtctgctgtaaccgacacaacatttacgataacaaagctacctgtgcctttccggcgaattttgtccgggaaggcacaaatgcagtaaaggaatgaatttcatggaacaaaaacgatataacgcgccggagcttctggcgccggtcggcgatatggagcgccttatttctggcgtgcgctacggtgcagacgcggtgtatcttgccggtaaatccttcggcatgcgctctgcgccttccaattttacaaacgaggagcttgaagaagctgtaaaatactgccacgcgcagggtgtgaaggtctatgtcacctgtaacattctgccgcataacgcagaacttgccgcgctgccggcgtttctcgagttttgccaggcaatcggtgtagacgcgttcatcatgaccgacctcggcgtgatggccatggcaaaaaaatacgcgccgaatgtcgcgatacacatttccacgcaggccggcgttgtgaattatgagaccgcaaacgcgttttataacatgggcgcagagcgcgtcgtgctggcacgcgagctctcgtttgaagaaatcgcggagatccgcgcgaaaacgccgaaggcgctcgaaatcgaagcatttgtgcacggtgcgatgtgcgtttcgttctcaggccgctgcctgctttcaaactacatgaccggcagagacgcaaaccacggcgattgcgcgcagccgtgccgctgggattattacctcatagaacgcacgcgtccggatcaggtattcacgatcgaacaggatcagaaatcgacgtatgtcttcaattcccgcgatatgtgcatgatcgagcacattccgcagctcatcgaatgcggtatttcgagcctcaaaattgagggccgcgcaaagtccgcgtattacgttgcctgcgtgacgaatgcgtaccgccacggcatcgattccgtcatgaacggtgagccgcttccgcagtgggtcgtggacgagacagagaagatcagccatcgcgcgtacagcaccgggttttacagcggtcacgagccggggcagaccgtaaacagcggcggatacatccgcggctgggatgttgcggccgtgtgcaccggcgaagaaaacggcatgatgcgcctttcacagcgcaaccgcttcttccgaggcgagactgtcagcgtactggagccgggcgaagtgccgtatgacctcacacttagtgaaatctacaacgaggatatggagccaatcgaatccgcaccgcacgcgatgatgacggtctacctcaagaccgaccgaaaaatcaaagagggcgcgtttctaagagtgaagcgcggctgaataacacctccgtttagggtccatacttttcctatacggaggtgtttttatgtctacacgcaggatcatcgcaacgtatgcgtttgtgatgttctttctcgtcatcgcactgctcggcaccgtgaccgccgctttcagcggcacaagctatacggaggccgccgggcggcagagtttatataccttaacggccgccaaggcgcgcggcacgatctacgaccgcaatttgcagccgctcacaaacgccgagcgtgtttatgtcgctgcggtaattccttcgcgggaaacgcttgccaaattaaaccgcgctgtaccggaagaaaaacgcgaagtcctgcgcacggcgcttgaaagcggaaagccgtttctgattgaagtcacaacacccgtcagtgatgacggcatccagacattttccgtcacaaaacggtatgcaaacccgcaaccagcggcgaatctgctcgggtatctcgacagcgactataacggcgcggacggtgtggaaaaaagcctcgacgcactgcttgcggaaaaccacggggaaatcgacgttaccttcgccattgatgcgctcggcaatgccatctccggcgaaacaatgcacgtggaaaacacataccgctttgcggacggtggcgtgatgctgacgctggataagcgcatacagcagtgtgtggaaaatgcctgcgcggaaatcaaaaaaggcgccgccgtcattttagactgcaaaaccggcgaaattctggcttccgcaagcttcccggccatagccccgaacgaccttgctgcgtgcatggaaaatgaagatgcaccgtttgtaaaccgtgccctgtgcgcgtatacgcccggttcggtctttaagctcatctgcgccgcctcggcgctcgaatgcggcatcgattacaaggaggtgtatacctgcaccggaagcattgttgttgacggcctcacgatcacttgctacggcggcaaagcacatggggaagtgaatctccacacagcgttgcgcagctcgtgcaacgggtatttcatacagctcgcgcagaagctcggcgcggaaaagattttaagtatggcggaaaagctcggctttggtacatctgtttcgcttgcagacaatttagaaacggccgcaggctcgctttcgaacgcgcaagcccttaaaaacgcccgtgcgctggcgctgttttcgttcggccagggtgaaacgacggtctcaccgctgaatttggccgctgccgtaaacgccatcgccgctgacggcatttatatgacgccgcggctcgtatatggcacggtcgatacaaatttatccgtacaggaaaccgaagaaaacaccggtgaaaaagtcatggagccgacgaccgccgcacgcttacgtgcctatatggaaagcacagcacgattcggtacagcacggatcggcgcgccgcaaaactgtgcttccggcatcaagaccggcacggcgcagacaggtgtatatgacgaaaacggggaagaaatcgagaattattggtatgcaggctacatctgcaatgcacaggaagagccgctttataccctcgtcgtgttggaagaaactgccggcgaaatgcatgtgccgcaggctttccgcaaaatcggcgaagcacttgtcgattttaattgacaaaccggtaaaaaagcattataataagatgcgtatgaggggtggagatatggcaagcctgaatcttgaagatatgcagcagattcaaaaagaactgcaagcaaaatatctcgaaaagtggggaggcctttctccgaaaatcggtcgcgataagctcctttggatgatgatcgaagccggtgaagttgccgacatcatcaagaaaaagggtgacgatgcgattttgaacgaccccgagaccagacaccacttcacggaagaggtgtgtgatgtgctcatgtatttaaacgatgttctgctgtgctacggcattacgccgaatgaagtcgagaacgtatatctcgaaaagcacaaacgaaacatgagccgctggtgattttagattttaatttgttttatagcaaaaggcacgggcaaatgcacatagctgtaccgaacagagagcggatccataggctggaagatcctcggaaaacaccatgtacaggccaacctgtatgactgccgcacagtgatgagctgtgccgttttccgcgttaaggagttcaaagtggtgtatgaagaaaagcttcatgcacaatttgggtggtaccacggaactgtccgtcccattgcggaggacagttcttatttttttgtaaggagtggcaaaacatgaatatggactattgcctttccgagctcaaagccctgctttccatcgattctccgtccggctttacggataaagcggcggactatcttatcggtgaactgacagcactcggctacgctccggaaaagacaagaaagggcggcgttttctgctgcctcggcggcgagggcagcccgcttgtgctgatggcacacgtagacacgctcggcggcatgatttccacaatcaagccgaacggccgcatcacgatcacgccgatcggcggcctgcgcgccgaaaactgcgaagcggagaactgccgtatttactcgcgcttctccggcgtttacagcggcaccttgcagctttgcaatgcgtcgatccacgtgaacggctcctacggtgaaaagctgcgcacatttgaaacgaccgaggtcgtgctcgacgagccggtaaaatccgccgatgatgtgcgcgcacttggcattgaagcgggcgatttcgtctgcttcgacccgcgcaccgtcatcacggaaagcggctatatcaagagccgtttcctcgatgataagctcagcgccgctatgctgcttgcgctcgcaaaggagatcaaagacaacaaccgcactttgaagcgcaaggtctatctgcactttacggtgtatgaggaggtcgggcacggtgcttccgcttccgtgccgaacgatgccgaagaactcatcagcgtagacatgggctgcgtgggcgacgggctcacctgcacggagcgcgaagtttccatctgcgcgaaggattccggcggcccgtacaattatgccgtgacaaccgcgcttgtggaagcggcgaagtccgtcggtgcaaagtatgccgtggacgtttatccgcactacggctccgacgtagaggcatcgctgcgttccggctgggacgtgcgtcacggcctcatcggcgcaggcgtttacgcttcacacggctacgagcgttcccacattgaaggcgtcgaaaacacgttaaagctgcttgaggcttatgttttagactgagcttaggctttttatattattctatctgcaaattatagaaggaatggtgaatacaatgcagtggacaggattaaatgatctcagagaaaagtatctttctttctttgagtctaagggacatctgcgcctgccgagcttcccgctgattccgaaggatgacaatagccttcttctgatcaactccggcatggccccgatgaaaaagtattttacgggtgaagtgaccccgccgagaaagcgcgttaccacctgccagaagtgcatccgtaccccggatatcgagcgcgtgggcatcacggcacgccacggtacattcttcgagatgcttggcaacttctcctttggcgattacttcaaaaaggaagcgaccgcatgggcttgggagttctttacaaaggttctcgagatgccggcagataggctttatatctccatttatcaggacgacgatgaagcgtttgacatctggacaaagcaaaacggcgtagacccgtcgcacatggtacgccttggcagagaagataacttctgggagcatggctccggtccgtgcggtccgtgttctgaaatttattttgaccgcggcgaaaagtacggctgcggcaagcccacctgcggcgtgggttgcgactgcgaccgttacgttgaggtttggaacctcgttttcacacagtttgagaacgacggcaacaacaactacacgccgcttgatcacccgaacatcgataccggcatgggtcttgaacgtttggcatgtgtgatgcaaggcgtggacaacttgttccttgtcgataccgtgcagaacatcatgaagcatatctctcgcattgcaaatgtgcagtacggtgcagacgaaaagtccgatgtttctctgcgcgtcattacggaccacatccgcagcacgacgtttatgatcagcgatggtgttatgccgtccaacgaaggccgcggctatgtgctccgccgtctgctccgccgcgcggcacgccatggcagacttctcggcatcaaccacccgttcctcgcggacgttgtagataccgtcattcacgagaacgaatgcgcttacccggagctgcgtgaaaagagcgctatgatcaaaaaggtcatcgcgtttgaggaagaaaacttctataagaccattgataagggctttgcgctgctcaacgacatcatcgaccgcaccgatgcaaaggtgctttccggcgaagacgcgttcctgctcagcgatacgttcggcttcccgattgacctgaccaaggaaatcctttccgaaaaaggcatgagcgttgacgaagaccgcttccgcgcactggtactccagcagcgtgagacggctcgcgcaagccgcaagaatgccggtgcagacgcatgggcgggcgactccgctgtgcttgacgacattgcaaagaccgaatttgtcggctacaccgatatgaaagcaaccgcaaaggtcacggctatcgtgaaagatggtgcacgcgttgaagctgtcgagaccggcgacgacatcgtgttcacactcgaccgtacctctttctatgcggaaagcggcggtcaggtcggcgataccggcgtcatcacgaacgattcctgcaccatccgcgttctggataccacgaagaatgcagcgggtgtgtttatccacaaggctgttgtggaggaaggcttcctccgcgaaggcgacaccgttgaggctgttgtagatgttgagagacgcaaagcgatcatgcgcaaccacacggcagctcacctcctgcaggctgcactgcgctccgtgctcggcgaccatgttgagcaggccggtcagctcgtcaacgagaatgccgttcgtttcgacttcacgcacttctccgccctgacggacgaagagctgctcgcggttgagaacctcgtcaacgagaagatcctcgaagacatcaaggttgagtgccgcgaaatgccgatcgaagaagcaaagaagctcggtgctatggcgttgttcggcgaaaaatacggcgacgtcgtgcgcgttgtaacggtaggcgaattctctaaggaattctgcggcggcacgcatatcgattccaccgctaagctcggcctcttcaagctcgtcagcgaatcctccgttgcagccggtgtgcgccgtatcgaagcggtcacaggtctcaacgtcattaagatgatctacgcaacgaacacactgctcaaggataccgctgttgcgatgaaagtcaacaacccgtccgacctcccggcaaaggctgcacaggtcaacgccgacctcaaggagaaggacagagagatcgagtccatgcgctccaagattgcatccatgaatctcggctccattctggataacgccgtggaagtcaagggtgtcaagatcgttacggcgatgctctccggcacaggcagcgacgcactgcgcaccatgtgcgataagatccgcgacgaaaagagcgatacggccattgtagccgtgctcgcaggcgttctggacggaaaggcaacgcttgcagcgaccgcaacgaaagcggcacaggcaaaaggcgtcaaagccggcgtgcttgtaaaggcagttgcacagctcaccggcggcaacggcggcggtaagccggacttcgctatggcaggcatcaaggaccagacgaagattgacgaagcccttgcagccgttgaaaagatcctcagcgaacagatctaagttctctctatacgttctatataaaatctcaagaaaggagaaaggtaaatggactgcattttctgcaagattgccaacggcgagattccgagcacgaaggtctacgaagacgacaaaatgctcgcattccgcgacctcgacccgcaggcgccggtgcacattctgatgattccaaaggagcacatcgcttccgcagatgaccttacggaagaaaacgcgcagatcgtcgcacatatcttcacggtcgcaaagaagattgcggcggcagaaggtctcacgaacggctaccgcatcgtcaacaactgcggcgaagacggcggacagaccgtaaagcacctgcatttccacctgctcggcggacgctctatggcgtggcctccgggctgattccccgcatataacgaaaatcgataatttttgaaggtaggtttttacaatgggtgaagtttataagatgacgatcgccggctgcgaacgcgagctgccgatctgcccgatcagcgatacgctggatattgccggttttgttatgttcggcgatgtagagatcaccgagaagaccgcaaaagcgctgatggaaaagtgcccggagcacgacatcatcatcacggcggagtctaagggcattccgctggcttacgagatggcgcgcatcggctgccgtcagtacgttgttgcacgtaagggcatcaaggcgtacatgacgaacccgatcaaggtcgaggtgaaatccatcacgaccgaccacatccagacgctgtacctctccgaagaagactgcgcaatgctgaagggtaagcgtattctcatcgtagacgacgtcatcagcaccggtgaatcgctgagcgcgttggaagatctcgtgcatgagatcggcggtaacgtcgtcggcaaggcggctgtgctcgccgagggcgatgcaaaggatcgtacggatatcatctatctggagccactcccgctgttcttcaagtaatttcataaaagctaaaaaagctgttcgcttcggcgggcagctttttgctttttatagggtatttccggcagcttcaatgcataaaatctatgggtgatgcggcttgaaacggtatttgtcttttaaaatcgcgtatattcctgtggtgtttttcctcggtgctctgacattttttgtgtgctctgttttgggtgcggtacatgcggtatctgtggccgcagcacagaccgaaaaccgccccgtgatcgttctggacgcagggcacggtggggaagacggcggggccgtaggcgtaaacggtgtggaagagaaaacgataaaccttgccattgcgctgtttgtgcgggaaaagctcgaagctgcgggctaccccgtgaaaatgattcgcgaaacggacaccgccgtcggcgataccacactgagcacattaaacgaacgaaagcgatctgatattttataccgcacacagatcgtaaacgagactgagaactgtatttttgtgagcatccatcaaaacttttttgagcaaagtcaatacagcggcgcacagatgttttactcagcaaataatgctaaaagcgccgaccttgccgaaaccatccgccgtgcagtcatcgagcaggtgcagccggataacacgcgcgcctgcaagcaggcagaaagccgcgtgtatattttgagccatgtagacgtacccgccgtgtttgcggaatgcgggttcctctcaaacccggaagaagctgaaaagctgtgcgacgaaaactaccaaaagaaattggcggcggctatcgtggatggcattatcgccttttgcaaagcggaataactctttacaaaacatctgttccgtggtaaaataagcttagaattatacaaaataagggggcggtgcgcgttatggcggctaaaaataaaatcgtctacatctgctcaaactgcgggtttgaatccgcaaagtgggcaggaaagtgcccggattgcggcgagtggaacaccatggaggaatccgtcaaaacggctgtttccgcaaaatccgccgcttccgggtattcttcttcagcttctacgctgctgacgcgcccgcttgcaatttcagagatcgatacggaggacgagcatcgttatcacaccggactttcggagcttgaccgcgtgcttggcggcggccttgtaaaaggctcgctcgtgctcatcagcggcgacccgggtatcggcaaatcaaccattcttttgcagatctgcgaatacctcgggcaaaagctgcgtattttatatgtttccggcgaagaatctgcacggcagatcaagctgcgcgcagggcgtctcggtgtttccagccccaacctgcgcattttggcggaaacggacgtgcagcttgtggtggagcacattcgcaccgaaaaaccggatatcgtgatgatcgactccatccaaacgatgaactttaccgatctcaattcgtcgcccggcagcgtcacacaggtgcgcgaatgcacgaacgcgatcatgcgctgctccaaatcgctcgatattccggcgattctcgtcggtcacgtcaacaaagacggcgccatcgcgggtccaaaggtgttggagcacattgtggacgccgtgctgtacttcgagggcgaccgccagatgacgtaccgcattctgcgcgccgtaaaaaaccgctatggctccacaaacgagattggcgtattcgatatgggggaagcggggctgcggcagatcgaaaacccctcgcaggcgatgctttccggccgcccgacgaacgcttccggcacatgcgtaaccgccgtaatggagggtacacgtccgctgctcgcggagattcagggtcttgcaacaacaagcggcttcggcacgccgcgccgcatgtccacgggctttgattatgcgcgtatggcgctgattttggccgttctggaaaagcgtgcaggtttctatttttccaatttagacgcgtatttgaacgtcgtcggcggcctgcgtatcgatgagccggcggtcgatctggccgttgcaatggcactcgtatcaagcctgaaagacacgccaatccgcgatgataccgtcgtgttcggcgagattggtcttgcaggcgagctgcggtcggtcagtcatatcgagtcccgcgtttcggaagcatatcgactgggattcacgcgctgtgtactgccgtaccacagcatgaagagcatagattcaaaaagattcagcggggtggagctcatcggcgtccacaacgtgagggaggcgtttgacgcatgtgtgcagtaaaagaacgatttgttgaaaagccgaatctgccggaaagcaaggtcacgacagcggcggtctccggcgcatatccggagattttggaagctttaaaggcacatggtattcggtgcgtcacaacggagtttgacacgcgtctgccggatccgatcgcgtaccatgcagatatgcagatgtttcatttggataagggacgcacgtttgttctgtgcggagaagaggcactcaaaaagcagcttacggatatcggctatcaggtagcggagactgccatgactccggagccgaaatatccgaaagatgttctttgcaacatgttaaacctgaacggcacggtgcttgcaaacctcggtgttatggatccgaacatttacacctgtctggaagacgccggccttaaaatgaggcatgtcaaccaaggctacacgcgctgtgcgacggctgttgtggcgaaagacgcgatcatcacgatggatctcggcattcgcgcactggcgcagtttttaggcatcgacgtgctgcttgtgcacgaagaaaacgtttttttggatggctacgattacggcttcttaggcggctgctgtggcctgatcgacaaaaatgtgttggcgttcacaggcaagctcgattctttggagtgcgcggcggagattcgtgcgtttctcgaaaagcactgcgtacagtacattgagctgacgcaaaaccagatgattgacatcggcggcattttaccgctgatggagcttgatgcataattcttaattctatacgcctgtgtattcatgtacaagcacccaaacacgcacatttcaaaacagattcacacggaagcatataagggggcttgaatctaaaaaatctcaaattatacaaaatagatattttgtataatttggggagcagcattttacgaatagctggcttttcaagcggattttcgtaaaacctgcgagatcatccgttttagcccaacccaatgttttttggtttcagcttacttaaataaacgcattcattatgaattgtgattgtgtgcgttgattccttgtaaatctcgactgcggaaatccgtgcgtttctcaataagattgtttttaattacctcggctccgttttctctgctgtcggtttaagtaccgcagcatatctatacgtctcgttccgaattataatgataatccaagagtaaattcaagtaccgattaggctaaacccgaaagctttgcagacaacggagccgaacaccaagctgcagctttaaaattcaaatttgtgaggtgtacccgttatggatattttgcctgaaatgccggagattgtgcggcaatatgctttatattaccgcaacatcaaaggccgcgcgccgaagactgtaaacgaatactgctctgacctgcggacattctttcgcttcatgaaacattttcgcggatatgtttcacaagatacgcccatggaggagattccggtcgacgacattgaccttgaatttatccgttccatcacgacgatggacatttttgaattcatgaactacgctgccgacggacgcagcaacatgagctccacgcgtcagcgaaaatcttcgagcctcaaaagcttttttaactacctgaccgtgcacgagggtcttttgaattctaaccccacagagaacctgaccccgccgaaaaaagccaaaacccttccccgctacctcacgttagagcaaagccgcgagcttttaaacgccgtggacgggccggataaagagcgtgactattgcattttgacgctgtttttaaactgcggcatgcgcctttccgagcttgtttccatcaacatgagcgacgtgatccacaacaactccaccctgcgcattgtcggtaaaggcagcaaagaacgcatcgtatacttaaatgacgcatgcttagcttctatcgatgcctacgtgcgtatgcgcccaaaggacgacgtgaaggataaaaacgcgctgttcatcagcaaccgcggcacacgcatcagtcctaagaccgtacaggccatggtcaataaatacctcacgaaaatcgggcttggcggcgcgggatactccgtacacaagctgcggcacacggcggcgacgctgatgtaccaatacggcaacgtggatattcgcgttttgcaggatattctgggccacgaaaatctcggcacgacagagatctacacgcacacctccagcaagcaaatggaggaagccgtaaacgccaacccactttccaaaatgcgtgaaaagactgataagaatgagaaataattaaaattgagcaaaatgaaagcctctatcgattccagttcgatagaggcttttatgtttgttttaaattactgtaaatgatcggaagtatccgttttatccgagaacagagattcctgctccatgatcttacggtcgatcaagcggccgttcacgtaaacgtactgaggcttgtcatcgtcatcgtcgtccagttcatcactgtcgaaattaaacgtatcgccgtctttggctacgcgaatttcggcatccttcgcttctgcttcctttttgtagaacggctggatcaggtacgtatcaagcaacgaatacgtcgcaaagctcgtcagatagctgatgaacgcacacaggaaaatgattacgagcagcagcgggatcaccgcaaatgccgccgggcagaacaaaaacgcaatgaacaaacccgcaaggattgccgtaatcatcaggttgcgcaataagcccataatagagaaaataaacgcgtttctgtaaatgtggcgcagcttcaagtcaaacgtgacgatcataaccgggatgtaatactgcgcaaacagcattagaatcgacaggatgcagcaaaccgcaagcggaatcataaacatccagttgtccgatacacgtgtggaataaaagaagattgagaagctcaagattacatatgcaagatacacgatcacgccgttcaaaagtgccggcttccagttgtttttcacagcgtcccagaaatccgaccaaacgaatgcatgctcttcccttgcgaagtttcgcgttacatacgctaagccgcatgtgaacggcgaaagcaggacgagcggtagtgtaaccgcatacagaatgtacaggtcaagcacaccaaagaacgacgttgcataaagaaaatgcggaaccggtaaaaggaatacgcccaccatcaacgcgatgaccacaataaatgggatcataaatgtcaggttcaactgcatcagtttagacagctttcgccacaagatctcaaaaaaacgtaccggcgctgcctttttcggttcatctttgtcaacgcccggacccggcttatcataattaccgaaaagtcctaaaaatgccacaaaatcaactccagaattagattaactcgtttttgcacgaggatgacactcattatacacgcttttcacgtgattatcaaggtctaataaatgaacatatacctgtgtggacgaaatatctgcatgtcccatcatggtttgaatgtcttttacggaagcaccaccctgcaaaaggtgcatggcaaacgaatgacgcagcgtgtgcggcgtaatctccttcgtaatgccagcctccgccgtatacgccttgataattttccagaaaccctggcgcgtcaaacgcgagccgttcagattgacaaacagcgcgtctccgctgttgtccgggtccacgatcaaatcgcgcatacgataaagataatcggatacagcaacgaccgctttcgcataaatcggaatggtgcgcacgcccttggtgccgcggcagaacaactttcccgtgcgcaggttgatatcctgcacgttgaggttgatgagctcactgacgcgaataccggtggcataaagaagctccagcatcgctttatcgcggcagcccttagcttccgtgacattcggctgggaaagcagcaggtctatctcctcgcttgtcagcgtctgcggcagctttttcggctctttttcaagctttacggatttcgccgggttcacctgcatatctccgcgcaggatgagaaacttataaaagcaacgcacagaggcaatattgcgggagatcgtggaatttgtgcggtttaagatgtgcaaatgctgcacatacgcttccaccgtctccgtttccacttcgagtggagatgttatattttcaccctccaagtagcgcaggaaagccgaaacatcgcgcagataagaatcccgcgtatttacggaactcggtttctgcacgagcatgtactcgcgaaacagcacgaagtattcatccatgttcattcatttcggcctcctttgctttaaaatctaaatttgcaaaatcaaaaagtgcaatacaccgtataaaatcgaaatgaaaaccagcgccgcaaacgcaagtaaaaaccgcacggtgcagttttttacggaaagcggttctccgttttcgaaaaacacccgacagctgcgccttgccgtgcaaagcgcttccgccgcaagcagcaaaagcaccgtgatgcacagcattgtcatcggcagataatcaaagcaccgccgaaaatacgatccgataccctcaagccggatcagtgccgtaagcgacgtgccaagcgtgaagcccttcagaattatcgcagcgggaatcacaagcacacctaaaaacgtcatgccaaataaaaaaatcggcaatgcgtaaaaaagcgaatcaaataaaaatgcggaaaatacaaacggaaagtccgttcccgtttcaaacggccccctaaaccacacagagccggaaaccggcaccatagctatttgcgatgtccgtgcaaataagcaaccgaacaaaaagccaagcaggaacaaaatgcgcaaagccattaaaacagataagctacgtggttttgcatatttcggctttgcttccattttcgttcaccacctataaaagatggtcaatctatatgtgaagcatcgccgtgttatgccttgcacactcacatggaaagttcttcggcgcggtgcgtgcaggcttcaaacgagctgatcatcgcctcattaaagtcctgttctttcaagacattcagcaaagcaaatgttgtgccgccctttgacgtgaccatatccataagcgcctgtgggtctttgccgctgtttaaaagcatatcggcgctgcctttcatggtctggcagaacagtgtaagcgcggtcttcgggtcaatgccctgctgcgctgcataatcacaagtgagctttgcaagcagatacaaatacgcaggcgagctaccgctgaccgcaatcaccgcattcatctgcgcttcgtcaatctcctgcgtgacaccgcagcaggagaaagcggaacgcacgcgcgcaaaatcctcttccgacacattgcttgtccggcacaacgccgtagcgccctcaccgagcagcagcggcgtgttcggcatggcacgcacgtagcggcggtctgcgccgagcgcgtcctgcaaattcttaaacgttacgcccgcagcgattgaaacgatgacaacgtcgtctgcattcttcttcgcaacggtcggcgcaataacgcgcagcacctccgggaaaatctgtggctttacgcaaaggaacaccgtatcacaaagctcggcaacttcttcggcagaagcacaggctacgcaaccggattctgtaaagcgctgcattttttccgcgtgcggattgtacatataaatatccccgaccgggaaagtgccggaagataagatgccgccaataatcgcggacgccatgtttcctatgccgataaagcccaatttgccgtttttcatgatacgccacctcacttctgtcttatatactataatactttttagccaaatttgcaagggcttccgtgaatatttttgcatctgcacaaatttatgtctataatcttatgtaaacttatgaatatgcagttccgctttgctacaagttattgcgaataaatatacaaaatcattcttatgctcttgattagcagctgcaaaattatggcttaaaatctgattttttcatctctattcacacccattactccaccgcatacgctgcatattacaaatattacgctccgtataacaagaggcacaacccgcatatttgcatacagcataacgcttatcgcaacatagaaaactgcatagagcatgccaagtacaaggccgtgcagcaagcctttttcccccgcgaggcgcgccgcaaggaaagcggaagcaaaaacagaaacgccgccgatcaccgctgcagccgtaccgagtataggctcggacggcaaaaagccgagctttaaaatcataaaggcacaaaccgcgatcagcacagccgaaaacagcatggaaaacaggagacccaaaagcagcttcttaaaattcagcatagaaaaagccccttgaaataagttttgtttcatacttattccaaggggctcaaaactattcgcttttaaaaagagtgaaacttacgcgtcttcctcgtggatggtatcgacgctgccgatcgcccaacgcttgatgcgcagtcttgcacggtcgctgccggtctcgatgataacgctgtcggtctcatcctttacagcgatgattctgccgcaaatgccgccgatggtcgtgatctcgtcgccgacctgtgcgttcttgcgcatttccgcttccttcttcttcttcttgttctgcgggcggaagaagatgaagtacatagccgcgatgattgcaccgtaaacaaggagcatgatcagcatgctggacatgttgccgccggctgctgcacctgtcgttgtcaaaacactcaaattcatggttttctttcctttctttcatggtgcgctccgttcgactgcaaagcggtcaatacacccgtcaccaaattaactttatacattataacaaaagccattcgtggttgcaaggattttctaaattcttttgttaaatttctctgaatactcctgataaaatgcttcaaaccggtcttcatcgagcgcattgcggatgcgttccatcaaattgttgtagaaataaagattgtgcataaccgtcaagcgcatggcaagcatctcccccgctttgaaaaggtggtgaatataagcacgggaaaacttgcggcagaccgggcagtcgcaggtcgggtcgatcggttgatcgtccagcgtgtatttcgcattgagcatattgcgcacgccttcatttgtaaacgcatgaccatggcgtgcattgcggctcggcatcacgcagtcgaacagatcaacgccgcggtgcaccgcttccagaatatttgtcggcgtgcccacacccatcaggtagcggatcttatcctgcggcatatgctcttcaaccgcttcaatcacttcatacatgacctctgccggctcgccgaccgcaaggccgccaatagcataaccatcgagccccaattccgcaatctccttcatgtggttcacgcgcaggtcgatgtatgtgcaaccctggttgatgccgaacagcatttggttcgggttgatcgtatccggcagtgcattcagtctgttcatctccgccttgcagcggcgcagccagcgtgctgtgcgtgcgcaggaatttttcgcgtagtcgtattccgccgggttttccacacattcgtcaaacgccatggcgatggtagaaccgaggttggactgaatacgcatgctttcctccgggcccatgaagatgcgatggccgtcgatgtgcgacgcaaacgtcacgccttcttctttgatattgcgcagcttcgcgagagagaaaacctgaaacccgccgctgtccgtcagtacagggccgtcccagccggtaaacttgcgtacgccgcccattttacgcaccacgtcatcgcccgggcgcagatgcaggtggtacgtgttggagagcatcacttggcatttaatatttttaaggtcgtaagcagaaaccgcacccttaatcgccgcagccgtcgcgacgttcataaacgccggtgtctgcaccgtgccgtgcacggtttggagctcgccgcgccgcgcgtggttttctcttttgataagcttgtacatgtaaagaaaattcctttcaaagttatttgatgaacatagcgtcgccgaagctgaagaagcggtagcgctccttgacggcagtgttatacgcattcaaaatgtgttcgcggcccgcaagcgcggagaccagcatgatgagcgtactttccggcaagtggaagttcgtgatgagcgcatcaaggcccttaaattcaaagcccggatagatgaaaatatctgtccagtcatcgtcctcacaaattttgccgcatttctttgcgacagattcaatcgtgcggcagctcgtagtgccgacagcgatcacgcgtccgccgtttttcttcgtctcgttgatggcgtcggcagtctctttcggcatgtgataatgctcgctatgcattttgtggtcgagaatgttatccacgctcaccgggcggaacgtgccaaggccgacatgcagtgtgacgaacacgaccttcacgccttttgagcgaattgcattgagcagctccggcgtaaagtgcagaccggccgtcggcgcagcggcagaaccttcctctttggaatacaccgtctggtagcgctctttatccttgagcttttctttaatatagggcggcagcggcatctggccaatcttatccagctccgtgaagaagttcgtgcccttattgtaatggaagcggatcaggcggttgccgtcgtcctttacttcgatgacctcgcaggtcatggaactgccctcgaacgtgaacgatgtgccgacctttgcacgcttgcccggacctgcaagtgcttcccatacgtcgtcaccgcaatttttcagaagcaaaaattcaacgtgcgcgccggtctcgtttttaatgccgtaaatacgcgcaggcaaaacacgggaattgttgagtacaagacaatcgccctcattcaaatactccgtgatgtcgtgaaaatgtctgtgctcgatctcaccggttgttttgtccaacaccatcaggcgcgaagcgtcacgcggttcaaccggcgtctgggcgataagttcttccggaagctcaaaatcaaaatcttttgtctgtaaagtttgcgtatccaagtatattccttccaatctgaattaaaatagccgcatcccccaaattacgcaggattattctaagaatttttcataaataaattgacaacaatccgtattccatgtattataataaggatagaggcgcggtttgtaaaagtacccgcgggttttggccctccacaggcatcggcccgcagaaaaaggacacaccgccgaagatctcagcgcatgtggtacgcgtggatctggttgctgtggcgaaagccccgtaactgtcatctgcaataggatggagtgctatcagagcttttccgcagggagactttcgtaaaagcctgtgcacattctattatattgtatgtatgaccggatttcaaccggttttttttcgctcaaaaatgaaatttgaccttaattttgtttttgagcgtacatttcatcatttttgaaaggatgtcctgcaaacaggacgggtgaaagaaatgaaaaagtataatgtcggtatcattggttgcacaggcatggtcggtcagcgttttgcaacgctccttgaaaaccacccgtggttcaacgtgaccgctcttgcggcctcttcccgctccgccggtaaaacatataaaagcgtcgtagaaaagcgctgggctatgaaaacgcccattcccacaagtatggcgaacatgatcatcttagacgctgttgcagatatggacgaagtcgtctccaaggtcgattttgtattctgcgccgtcgatatgaaaaaagacgaaatccgcgcccttgaagaagcttatgcgaaaaaggagtgcccggtcgtctccaacaacagcgcaaaccgcggcgtcgaggatgtgccgatggttgtgccggagatcaacgccgaccacattgaaatcatcaacgcacagagaaagcgccttggcacaaagcgcggctttatcgccgtaaagtccaactgctcccttcagagctacgttccggctattcacccgctgatggacctcggcgtcacgaaggtgctcgcctgcacatatcaggccatctccggcgccggcaaaacctttgaaacgtatcccgatattctcgacaacgtcatcccgtatatcggcggcgaggaagaaaaatccgagcaggagccgatgaagctgtggggccacattgagggcgataagattgtcaacgcgaccaccccgtccatcacggcacagtgcttccgcgtgccggtttccgacggccatacggctgcggtgttcgtctccatggaaaagaaggtctcaccggaggaaatcatccgccgctggacagagttccgcggcccggcacaggaactcgagctgccgagcgcaccgaagcagttcctgcactactttacggaagcagaccgtccgcaggcaaaactcgaccgtgaactggagcatggtatggccgtttccatcggcagactgcgcccggatacccagtatgactacaagttcgtttgcctttcccacaacacgctgcgcggcgcagcaggcggcggtgttctgcttgcagagctgctcgcaaagaagggctattttgactgataccgttcaggaggtattttttagatgaaagaaaccatttttaccggcgcagcggtggcacttgttaccccgtttaacccggatatgtccgtaaactacgaggaacttgaaaagctcatcgagtttcagatcacaagcggcaccgatgccattgtcacctgcggtaccaccggcgaagcggcaacgctcaccgatgaagagcacgtgaaggtcatcgagttcaccgtaaacaaggttgccggccgcgtgccggtcatcgcaggcaccggcagcaatgataccgcctacgccgtggagctctcccaaaaagcagaagcactcggcgcaaacggccttctgcttgtcacgccgtactacaacaagacttcccagcgcggcctcgttgcaagcttcaaccgcatcgcgggcagtgtaaaaattccgtgcattgtgtacaatgtcccgagccgcaccggcctcaacattctgccggaaacgtactacgagctctcgaagacgcagaacatcgttgccacaaaggaagcgaaccacgacatctccgcgctcatcaaaacgcgtgagctttgcggtgatgacctcacggtttactccggtgaagacacgcagactttgccgatcgcgtctctcggcggcaagggcgtcatctctacgttctccaacatcatgccgaaagaaatgcacgagcttgccaccgcttccgttgcgggcgacctcaagacggcgcaggcactcacgtttaagtatctcgacctcatgaacgcactgttcatggacgtcaacccaatcccggtaaagcaggcattgaacctgatgggcttcaattgcggccactgccgcttgccgcttgccgatatgtccgatgagcagattgcaaagctgaaggccgaaatggcaaagcatctgcagctcgcctgattaagaaaggaacggacgtaaaatgacaaggattattttatgtggctgctgcggcaaaatgggtcacttcatcacgcagcttgtttccgaacgcaccgattgcgagattgttgccggcgttgatctgaacgtcaatgcacagattgcttcctaccccgcttacacctccatcgatcaggtgacggaagtggcagatgttatcattgacttctcccacccctcccttttaacgccgattttgcactacgcggcggaaaagggtggcattccggccgtgctctgtaccacgggctacacggcggagcagaccgcggagcttaccaaagcttccgaaacgcagccaatcttctattcccgcaatatgtcactcggcattaacctgatgctggagcttgcaaaaaaggcggcaaaggtgctcggcgaccagttcgacattgagatcgtcgaaaagcaccacaatcagaagattgatgcgccgagcggcacggctttgatgcttgccgatgcgcttgcttccgtgcgcgacggcgaaacgcagtatatgtacgatcgccacgcacagcgcaaaaagcgcgaaaagagcgagattggcattcactccgtgcgcggcggcaccattgtcggcgagcatgaggtgatctttgcgggcaacaacgaggtcatcacgctctcccattccgcgcagtcaaaagagctgttcgcggtgggcgcagtaaacgcagcggtattcatgagcggcaaaggccccggcctttacgacatgtccgctttggtttaagaaagggatggaacagatcatgggcacaaccgaaatcagcacggtcagcaacatcacactggtcaccctgcaaggcagccccgccaccacaggctttatggctgaggtattcgagcgcatcgcggagctcgatatcaacatcgatatgatctccatgcccccgaaccacggtgcaaatgccggcctttcttttaccatttctgaccaagacctcatcgaggtgctgtcttttgcgaatacgctcaagaccgagaccggcatcaaggttatcgtcagcagcgtgaaccataaaatctccgtctatgacccgcagatgaaaaacacgccgggcatggcagccagagtgttcagcgccatcgccgcaagcgacgccgacatccgcctcatcacgacctccgaagtcgagatctccctcctcgtcacggaagcggactacgacaccgttttggaagccatcgaagaagcggttaacgcgaaataatttttagacaactataaatacgaaaacagaaggtcaagtctcttatccggcttgaccttctgtttttgattcttatgctttgtatttttgattcaatttcagagaataaagtttataaagcgtataagcactttcatttttattgtgatgaatcatgtttacacacggctcaacgagatctttatatacctcgttccagatttcttgggcgttcgatttttgattgatagcttcaacgatacccggtgccatttcatagtattctctgatttccgtttcgccgttcggccgatcgtgtcatatatatggcatattaaaaacgagtgaacacaaaagccaaagccgctgaatacactcgtttttatggtgcgggtagcaggggtcgaacctgtgactttgaattaggttatgggcaactgtcgttgcctcattgtatcgcaacgccaaaacaattcaccggattgttttggctgcgacagataacagccgcgtgtggttgttgtgagtggtggaacagacttgtactcaatttaaagtgaaacattattgaggacacactcgtaaaccaactttttgcttacggtttttctgctatcgcaaatatacccgcacgtctgaaactgcccataccgtttggcataacatatttgtcgtaataatcgcagatttcaagaaatttcttgtccatactgatttcattgattttcttatgcacttcttgagcggaattctgccgataaagatgcaacaaatacagatgcgttagactaccaatgctgcgacattccaaaacattcatcccgtttttgttcaaaacatcccttaattcatcaatatcataggcttttaattcagcaatggatgtaagttcctcagcattgtcgtagttctctttgttaaagcaacctgtttccattatgtcctttacggacgggtgaatgtagtgcagtttactaagactatagttcagccatgtgactgtcatacaacttttgctagaaaccgaaagcattaccttttttccgactctgcatatttcagcaattacatcttctgccttgcttccagagaatgaaattgccccgtcaaaacataacacaaggtcaaattcattattctcgaatacatccagacaacaagcattgtgcttaataaactgaatgtttgttaaacctatcgctttatcttttgccgccttaatcatttcatcagataaatccaaatgtactacatcaaagcccattctagccaaaggtatggaataagctcctgttgctgctcctacatccaaaattttatgaacccctgataaatggctttgaattgccttgagcctcaaaagacgatttatcatttcatcgtcataatcaacttcttccgttttggacatttcatcccaaaatttctcatattcggtcaatttatttttattcactcctttaagtttggtgattaattaaactacaatttattgccctcattatatcatttaataaagcacttagcaagatgacaaaaagtccgccgtaattctatcaaaattacggcggacttatggtgcgggtaacaggagttgaacctgcacaccgaagtaccagaacctaaatctggcgcgtctgccaattccgccatacccgcatattttgttgactaaactattataccgtattctgaagaaaaatcaagcccaaacagagaaaaacccggaaagagtttctctccgggtaatttctcttgagcaaattacttatgccttcttctgctctgcgagcgcttcttccagtgcgagcgcgagctgatccgggcaggaggtgttcttaaagccgcacttgatgcccttgcagcgctttacgtattcgtcaacggtcataccgaccgcaagcgctgccacgccctgcgtattgccgttacagccgccatcgaatttcacggagcggataacgtcaccgtcgagctctacatgaatgcctctggaacatacgcctttcggtgtgaaatcatacttcattttgcatttccctttcattcagaaaataatttatcaaattcggattcggccgtcgtgaacgtgccgaccggatttttctttgtcgtgtaaaagccgtgataatccgtgccgccggtgacggcaaggtcatacttttcggctaagcgcaacatttccgctttatcctcctccgtgttgcgcgggtgataaacttcaatgccgcggatgcggtggtttctgcacagctcgcgcagaagatccatgctgtggtattcgctcgggtgcgccaagaccgcgatgccctctgcggcgtcaaccgcatccatcacggtatcgacgtcggggtaatccaccttctcgtaggtgatgcccgttttggaatcatagagcttcttaaaaacctcgccgaacatctcactcgcgtagccggcgtccattaacgcctgcaaaacgtgctgcttgtagatattcgtcgagccctccgcgcggcgcagaatcatctcgcgcggaatcgcatacaggcggcagactttatcaacggagcgtagcatcgccgcatggcggctgtccgtcgttttttgcagcagcggcagcaacacttcgggcttcttcggcttatagcacaagatatgcgctttgccgtgacgcttcgggtctgcagcagaaatttccacgccgggaatcaccgtcacgcccgtttcccgcccaagctccaacgcgcattcgcagcccgccatggtatcgtggtcggtgagcgcgaacgtcgtcacgccgcggagcgcagcaagttgtacaagctcctcaagcggcgtggagccgtccgaatatcttgtgtggcagtgcaggtcaatagacattggttttctcctttcgcggcttttccggcggacgcgtcagcagcttttcggctgtgaagcgccggaacccgaagttgaataaacacaggtcgattccaacgatgatcgctgtcaaaatcaaaagtgcaatactgtttaagcgatacaggcccatgatctgcccgatgaaaatgagcaaagtcggcagcacgatatagccggaaatttgaatggattccgctgtggagcgcgctttcacggtcagcatcgcagcaaacgtaacgcccagcaccgtgatggccggcgagagcaaaaacaccagaacgaaccatgaaaggtcaaagaaaaacggcgctttcaaaaccatatcgccgatagccgtgacgacaaagaacagaataaacgaaaccgccgtgacaagcccggaagccaaaacactgcttgccgccttcacctgcaaaaagcggcgcacactgaacggcgcaaacagaagcgtttccattgtgccgtgtgcccgctcgcccgcaaacgtgtacgaagccgtaatgattgccgataaaagcggaatgagcataaacagcatcggcgagataaacgccgtgaaaatgtagaacatctgcgcgcgctcgtccgtcccctgcgaaatgttatcgagcaagtttttaaactgctccacaccggaggatttcggtgagaccatagcggaaacgaacaggaacaaaagcgggaacgccaccgcaaaaacgagcggcagtgcgatgagcaacgtcaagatcagcctgcggcggcacaaagcggaaaggtccttcatcatgagtgcacgttccgctttggaaaacagcttataaaacagcttcttcatgcggtgtctcctctcccggctttttcacaaacgcgtaataaacatcctgcaatgtgggtgtacacacggatgcttcgtaaatgccgacattctcccgcacaagcccggaaataagctccggcatatcgacttcggattcgattggcttttcccacgcgccatcatgcagtgtgaagtcctccggcatcttctgcgtgtcgctcacgcgaatcaccgccatgggcgtcaattcggaagcggccgtaagcattgaaaggtcgccgctcgcccgtaaaaagccgtgctccagcaccgcaaagcttgtgcagatctcctccgcgctttcaagatgatcggtgcaaagcaacaccgtggcgccggtttcctttgcgtaatccgaaagtgtacgcagcaccatcgcgtccgataccgcttgctcgccgccgggcaaaccgtccgagaacacgatctgcgggcgatgcacaagcgcacgcgccagcgataaccggcgacacatctctgtggaaaacgtgtagaccttgcggtcgcgcgcgttccaaagatcaagcttcttcaaaagctgcgccgcatgtgtacgggcttgctccttgcgcatgccatacatggaagcgaacatcagcaggttttccagagcgctcatgctgccaatgcaggccgccgtatcggtaacgataccgcttttcgcgcgcagtttgcgactctctttcacagaagaaagtcccagaactgtgctgtcgccgagcgtcgggcgcacaagacccgttaaaaggcgcagcagcgtcgttttgccggatctctccgggccgaggcagccgacgatctccccggcttccacttcaaggtccacgccatttatcgcaatgatgtctccgtattttttcgttaaatttgcagtttgtatcgcgatcatctgctcaccgcctctcagcgcacatcggaggtgcctttttcgcgcagataggttgattccaaatcagccatgtgcagcttcacggcgagcggatagcggtcaaatgccaggctgatggcaaagctgccgcccttcgccgcgtcgtcaaagccacccatgtgccagcggattgccatggcttccacaggctttagacgcataaaacgctcgatgaggtaaacggatttttcaccgtgaccgaacgggaatgcatcgtccaccgtgtaaaacggacgcttttcccactgcccggtctcgtcatttttcacgttgcgcgtggaggtcttataaaactgcgatttgcacacgtcgtgcagcagcgcacatatcgcaaagctttcttcactgtcgccctcgtcaaaccaacgctcgcgcatcgccttgtagacattcaggctgtgcatcacaaggccgctttcgcaggcacagtggaactttgtgcttgccggcgcggtgtaaaaatcggtggtatccagccacgccaaaagcttctgcgagccctcgcgcgtgatattctgtgtataaatggagataaattcctctctgtacggattcgacatgcttgtcctcccgtaaataaatttcaaactctgcgtatagtataacacagaaatcgcgcgttttcaaacagtttcgcggtttgtaaagaaaaagaaaggtcatcgcagcaaatgccgaaatgacccttccggtaaatcaatgattgcccgcgcagccgtgcttatcttccccgcagctatggctgccgcagtcatgaccgccctcgtggtgatggtgtgcacagacggtatccgggttatagagcagtgtgccgttcagcagcgaattgaccgccgcgtccgcgctgccggaaacaccgggatacaactcgatgcccgcttctgcaagcgccgtgcgcgcaccgccgccgatgccgccgcagataagcgcattcacgccgtgctgcttcaaaaagccagccagtgcaccgtggccgctgccgtttgtgggcgcgacctctgcatttttaacttcgccgttctcaatctcatagatcttaaacgcttcggaatggccgaaatgctggaaaaccagtccgttctgatacgttaccgcgattttcatgttcatgcttcctttcaaatcaaacatcctattttctgctacgtgcagaatatgctctgtctgcggctgtgccgcgtttcggcatttgtcatattccgcacggctgcacccgccatgctgcggcgtgcagggcatctgctctgcagaaaacgccatgcgagagagctggctgctgagttctttaagcgccgcgcgattgacggtgtagtgcataaaataaccgcacttttcgccgaaaatgagccccgcttcacgcagaacttttaaatgctgtgaaaccgccgcttccgaaatatccagctgtcttgccagtgcgcgcacgcaacagttgcggcgcagcaaaaggcgcagcagcaaaaggcggttttcatctgccagtgctttgaacatcatagccgttgaccccatagcgtcctcctgattaagcatttgctaaattaaattatagcacgaattttaattaagtcaatactaaattaaattttcgcctgtaaaaaagcagcacaccgaaacgatgcgctgccaaaaacttttatgtacggtcattcaacagaacggaagcccttgccgatgatctcgctcgtattcgtgatgaacataaatgcctttttatcgacggaacggacatacgcgcggagcttcacagcttcaccgcgtctgcacgcaaccatgacaaccttgcagccctcatgcgaatacgcgcctgtggcatccacaatggtcgagctgcggttcatcttgtgaatgatgtaatcgcaaatctcctccgggtgcgtggtgacaatggagaaatatttgcagaggttaataccttcaatcacggaatcgaccatgaacgccttgatagcaagaccgagcaatgaaaacaggcctgtacggatatcgaatacaaacatcgcggaaaacgcgatgagcgtatcgctgacgagcagcgctttgccgatatcaagactcgtgtactttttgaggatcatcgcaacaatatccgtgccgccgctcgaagcgttgcagttaaagaggatcgccgaaccgaccgccggcagcatcatgccgtagcacagctcgaggaacggctggtcggtaagcggcttagaaagcggaacgagcttttcaagcagccacgtcaaaaacgaaagcagcatgctgcaatacacggtaagcacaccgaaaccgcgtcccaaaatgataaaaccgacgatgagcaagatgatattgataatccacatgatacccgctgtggagaacgacggaaaaatatgaccgagcagaatagagataccgctcacgccgccggtggagaaattattcggaaatttaaagaaataaatgccgatggcaaaaataaaggtgccaaacgtgatgagcaaaaatgtctttaaattttgttttgtaagcttttctttaacattttggattgggttattcatactacgccaactttcctcattgcaggcaagccgcctgtttttagtccgtctgagattttaacacagcaaacaccaaaattcaacaggaaagcacgcaaatgaataattgattttttctccgtcattttttgcaagttgcgtctttcaaaacttgttttacatacgtttcgagcgcgttttgatatgccggaaaacgttcccgaagggaagcggcaaacgcctcggactgtacgaaatcgcagaatttgtcatacggcagaaatttgtaatcgatcgtttcattcgcctgcagcgtgattgggatatccgcgctttcaaccgttgcggcatacacgtaaaacaccgtcgggccgtgcgtcagacgcagcaaaaaggtcagctcttccggctgctttacgatgccggtctcttccctaagctcccgcaccgcgcctgcaagcggtttttcgccttttacaacggagccgccggtcacctcccatttcagcgcgaaaatccgctttttcgggtcgcgctgcgtgcacaaaacctcgccctgctttgtaacggtgaaaatctccaccacacggtggtgcgcaccctccggtatgggctttttgccccattcatcgcggtatagatcaaagccgagcagttccccgttttcgtccaccgcgtcccacacctcacgttttttggccattttccgttcctccttttggcttttatgatgcaaaaaggagagcggtcgaaaccgttctccttctttgctttttaaaatcaaatcaggctgcggatgtaatctgccgccttgcggatatcgccttcagggtcatcgccgacttcgcgttcgatcgtcaggaagcccttgtagccgatgtcgttcagcgctttgaagtacgccgggaaatcaacgtcgccttcgccgagcggaagctcaatgaaggaagcgtcgttcagcatgtcggattcctccatgccgtacagaatctccgggctgacataatgcagacgcttgccgtcttttgcatgtgtgtgcacaatgtaatccttcagcgtgtagaccgcctgcaccgggtcgtcacccgtgaccatgacaaagtttgccggatcaaggttgacggaaacacccttggaatggaggccgtcaaggaaacccttcagtgtcgttgcaatctccgggccggtctccacggcgaagtgtgcctgcatggagtctgcatacgccgcaagctgaccgcaagcatcctgcatgattgcatagcgcgggtggctcgaatcgctcggtacaacgccgatatgcgttgtgatcacatcggtctcgaggtcctttgcaaggtctacgatgcgtttggatttttcaatgagctccgggttcagcttcgggtcgttgaagccgtggccgaggtcgccgcacagtgcagagatcgtcaggccgtgatccttcacgcgcttcaaaaattcgcggcgtgcttctgcgttcatattctcgggcgacatttcgcctcttgttgcgtaaacctgaatgccggtcgcgccgactgcaacagctttatcgagagccgtgagcgtgtcggtgcggaagccgtccatcagaacgccgatagaaaagggatacataagcaatttcctttcttaatgcacagggagcttagcccagcgtgatctctttgtgctgctcggaggaatcgtaaatcgcctgcatcatctgtgccgtgatgataacggtgtcgatgtgagacggcagcttcttgccggtcttgatgcagtcgatgaatgcgtcaatctcgttctggaagtggtcgcgcatcttaaagacaggcttatactccgtgagtgcaccgtactcggagctgtaaacggtgaaatctttgccgtactggagacggatgccacccttatcgcccatgaagtcgatgtaacactcgttttcgccgatgttctgcgcccaagcgccgtgcagagagataaccggaccttcggtacggatcatgccgacaacggagtcgtctacatcgtaggtgccgtcgtacttcgggggacctgcccacatgtcggtatacgcgtagcccttcatatccttgccaagctcgcagaaggcttcgcccgtaacggtcttaaccttcgggtcgccgcagcagtacataacgatatcaaggtaatgtacaccccagtcaatcagagcaccgccacctgcaatcgcctttgtggtgaacgcgccgccgaggcccggaatggaacggtgtgcacggaagctggcatgtacatggtagatatcgccgagcttgccgtcgtcgatatactttttgatgaggttaacgctgtcattgaagcggttgacaacgccgatattgagcactttgccggtctcatgctgaaccttctgcatctcaagggcttccttgtaggttcttgcagccggcttctcgcacaaaacattcttgcctgcacgcagtgcgtcaatggaaatggtcgggtgaacattgttcggggtgcagacggaaacagcctcaacttccgggtctgccaggacatcgtgataatccacaacagcggtgccgcagccgtacttttcaacggcagcctgtgcgcgctcggggatgatgtcgcagaaatacttaatttctgcctccgggttgttcatgtaagacgggatgtgtgctgcatttgcgatcgtaccgcaaccaataacggcaactttcattggaatacaactcctttaagaattttctgcgggctgcggaaggttctttttatcctcctcggcccattttttatattcacgcggcgccatgcccacatattttttgtaggcgcggctgaacgcatggatcgatttgaagcccatcagctcggcgacttttgtaacggaatatccctggcgaagatactcgtttgatttttcaaagcgccgctttgtgtgataggatttcaggctttcgcccgtaaacgcagagaacttctgcgcaatatgggtataactgtacccaaactccgcactgagcgcgctgagattttccatggactcaaggtgcacatcgatgtaattaatgacatcgtagacgagcttttcatcggaattattgctgccgctcagtaagtagtttttgtagaactttcggctgaaaatacggtatacgccgcagatgatctcctgcatgtacgcttcaatcaaaaggttcgagagtacgtcatccgaaatgaattcggaaagcacgcgcatgaacgtgtcctgtaagctgaccgcgttatgaaactgcacctgctcgttcgtatcaaaaaagctcttaagctgtgcaatcttctcatttacgatcggctccacaaaatcaaagccgagataaaagaaacgcagcggttcgatctccgccgagatgatattgtgcatctgtcccttgcgcacaaggagcaggtcacccttctgcatggtgtacaccgtatcatctacataaaatgccccggtgccggaaagcacgtatgtaatctcatagaccgcctgctcgtgctcaaaggtctggtaacctgcttcgcagcttaagtccccaatctgatacagaacatatggcccgtacagcatatccataccggcgtatgtattatcgaagtgaaattttgcccgattgaccggcattgtggtatcgcctctgtgtttacgcccttattataatgaaagagcgcaggaatgtatttgatattttttgcaaatcagatggtaaaaaacacaactttaccagaaaatcagcttttcttcgcctctttttcaatggcatctagctcccggcacaaatggccgaacaattcgccgctcacaacattctcgctctcgcccgtcatgttgagcgtcacgcgatccaaaaaagcggaaaacgcttcaagctcttcttccgaaaagccctgaaacgccaccgcgtcgatctggtctaaccgctcgcggcacatggcacaggccctttgcccttcttctgagatataaagccgcttgcagcgtaagttttcggcatccacttcttttgtgagataccccgccttctgcaaacgctttgtagagagcgcaatggaggccgggctgacgcgcagatggtctgccacctgcacctgtgtacacccgggatttgccgcaatgaaatccagcacaggcatctggccgaaatacagaccatgctcctgcgccccacgccgatgcgcaagctgttgcacaagctccagcttatgtaattttcccatcagttcatgcaattccatagccgcactcctcatacgcctctttgatattattataaccccgctgttaaatttgtcaacccatagtaccgttttcccgtgcacttcggctctatatttttctttacacagatgctttattgtgctatactgttagcagcttgattataacaatttggaaggggttttaaaaatgaatgaaacgattcaggttttgatgaaccgcaagtccgtccgtgtttttgaggataaggagatcacacccgaaatcaaaaatattatcctcgctgctgccatgcgcgcaccgaccggcggcaactgcatgccgtactccatcattgacgtgacagatcagtccattaaggataagctcgccgaaacctgtgatcatcagccgttcattgcacaggcgaaaatggtgctcattttctgtgcagattaccaccgttggtacaaaaagttcaaaatggcgggctgcgaggacattcccgcgccggagctcagcaacatggtgcttgcaacagaagatgccgtcatcgccgcacacacggcctgcatcgccgcggaaagtctcggcatcggttcctgctatatcggcgacattgtggagaacttcgagattcacaaagagcttttaaacctgcccccgcaggtcgcaccgctttgcatgctggtcttcggctatcccacccagcagcaaaaggaaagaaagcagacaactcgttttgcaaagagctccatcgtgtttgagaaccggtatcgtgagctttctgaagaagaactgctcgaaatgatgccaaacgaccgcacaaaggcgttctataaccgcaaatatgtttccgattttgcgcaggaaatggtgcgttccacaaaagagatctacaaaaactggaattccaaggaataagccatgctgcacatcggttgtcatctttctgcctctaagggctactacgctatgggcaaaacggcactttccatcggcgcggatacgttccagttcttcacgcgaaacccgcgcggcagccgcgcaaagccgcttgatctgaacgacgcacaaaagttaaacgagttggcggcggaaaaccactttgctgtgctgctcgcccacgcaccgtatacaatcaatccctgctccgcaaacgaagacacccgcacattcgcccgcgaaacgatgcaggatgatttgaagcgtctggaagccacaccgcacaatctctataacttccaccccggcagccacgttggacaaggcatcgagaccggcgtcacacagatcagcgaaacgctgaacgccattttatcttccgaacagaccaccacggttttactcgagaccatggcgggcaagggcacggaagtcggctctcattttgaggaactccgtgaaattctggaccgcgtaacgctttccgacctcatgggcgtgtgcctcgatacctgccacgtgttcgatgccgggtatgacattgtaaacgacctcgacggtgtgttggcagagtttgaccgcgtgattgggcttaaccgcctgaaagcggtacacattaacgacagcatcttcgggctttcctctcacaaagaccgccacgcaaagatcggcgagggcaagattggcacggaagcgttccgccgcatcatcaatcaccctgtcctgcgccgcctccccttttatctcgaaactccaaacgaactccccggctacaaagccgaaattgaacttttgagagcgatggttgaggagaactaaaagcataattcaccataacactctaagcacccagaccgcgtttgtaccggcttgggtgcttttagtcatttcacttttactcccacaaccgcagtaataaatttctaccaactaatagtgaatatttcccgcaaagctttccctttttaggaaaacctcacaaaatatttgaagcgctcaaatgcgtgctaccacacttgtgaaatttgatgctacgcaccaagtgaaatacaatccgcccttaacgcgtgcagtgcatttcactgcgaagcaatttcacaataaccgcaggttattatttcactcgccgtaaggcgaatttcacagaaaaaggtctttgtcaacaatgacaaagaccttttttctggtggagatggcgggaatcgaacccgcgtccgaaaaccggttaccggggctttctacgagtgtagcggctcttttgacattccctccgcgcaccgccgaacagcaggctttgcgcatcagtagcctttagatcatgacgggcttaaaggcgtgggcccgttcacgtgcaccgctaagtgacgctcttatcccgtccgcggtcctacaggtaagaacggctgcttaattaagcagcaacagcaactgtattgttgtcgtttaattttaagtttgcggattttatagcggtcccgcaccgctactcgcttaccagggcttccagtccccgtcgaaacctttacatccccatataaaaagcgatattgctaccgcttttatctgtttttctctttcagcgcacgctgaatatcgcgttgggcatcacgcgcggccatatcggcacgcttatcgtagagctttttgcccttgcatagaccgacctgcaccttcacccgcgaacccttaaagtacacggaaagcggaatgagcgaataaccgacggttttggaaaggccaaaaagccgcatgatctcgcgcttgtgcatgagcaaacggcgcacccgcatgggatcgcggttaaagatgttgccctgctcatacgggctgatatggcagccgtttaagagcatttcaccgtccacaacagagcaccacgcgtcctttaagttgcatctgccctgccgcagcgatttcacctctgtgccgcaaagctcaatgcccgcttcaagtgtctcctccacaaagtaatcgtggtaggcctttttgttctgggcaatcgttttaaattctgtttttgccacttggcctgcctccttctgctttgtgtgtgatttactatacaccactttcgcggttttgtcaacgcgaaaccgattttacagctcctgtctgccctcaatggcgcgggaaagcgtcacttcatcggcatattcgaggtcaccgccgaccgggatgccgtacgcaagacgcgttacgcggataccgagcggctttaacaggcgcgaaatgtacatggcggtcgcttcgccctcaacggtcgggttcgtcgccatgatgacctcctgcacggtgccgtcctgcacgcgacgcaaaagctcttttattttgagctgatccggcccgatgccgccaagcggcgaaatggcaccgtgcagcacgtgataggtcgcgtggaactcatttgtgcgctccagtgcgaacacatcgcgtgggtcttccaccacgcagataaccgagcggtctcggctttcatcgcggcacacggggcaaaggtcgccgtccgtcaaattgcagcacacggagcagtaatggatctgctcgtgcgcgtcgatgatcgcctgcgcaaagctttcggcatccgctttatccatgttgagcacggcatacgcaatgcgctgtgcggacttatgccccacgcccggcaagctctcaaatttatcgacgagccgttcgagcggcggtacgtgataaccggccattagaggatgcccggaaggctcatgccgccggagattgcgccaagcttctcctctttctcgtttgcggctgcgcgcagtgcttcgttgacggcagcagcgacgaggtcgccgagcatctcggcatcatcagggtcgatgacttccggcttgatgtcgatattctttacttccattttgcccgttacggttgcggaaacagctccgccgcctgcggccgcggtgtattccttcgcttcaagctccgtggtaatctgctccatctgctcctgcatcttctgtgcctggcgtgcaagctgctgcaaatttgcggctccgccgccgcccataccctgcggtaaacgtgctttcatagttaagactccttactgtgtagtttttaaatttatttttcttcgatctccacgccggcttcgcgcatatcgtgcaaaaaggcgtcgagcggatctttcggtttttcgccgtccgctgcgggcggcttataagggccgagtttatacacacgcccggtcacctgctgaatggcctcgcggatcttttctctctggctggcacgtttcaagagatcaaacgcaatctgcggtgcttcgatgagcatgtagtcgccgctgatgtacgccgctgaacccttgaatgccgacgccaccgactttgagtaattttccatatagccgataatgtccgaccagccgtcgaacggctgcgcattttttgcaagctcctctgtggactgcggcttgtcctttaccgcgggctgcacaggtgcgttgttctgtggtgtctcgagctgttgtaccggtgctgccggtgcttcggctgcgggtacactcggtgccggggtgatgggacggcgcaggccgccgcgctccaaagcttcaatgcggcgcaaaagtgctgcgggtgaggtatccatttccggcgtgcaaagacggataaacgtcatttccatttccgtgcgcttattcatagtcttcatgcgcgactgcgcggactggaacgcatcgagtgcgtgcagaatcgttgaaagctccatggaaagcgccgttttggtcatggcttccagctcttcgccaacggcatttacaagtccgcttgcgtccttcatcgttttgatgagcatcaaattgcggaaaaaacccgcaagctcctcgcacagcctgcccatgtctttggaagacttatacagcgcgtcgatcttttcgagtgccgcggtgcggtcgcccgtgcgaatgcactcggcgagttcaattaagtgcccacgccccgcaaggcctgccgtttccgcaacaagcccatacgtcacgtgcccgtcgctgcggccgatgcactgatccaaaatggaaagcgcgtcgcgcatgccgccgtctgccgtaacggcgatgagcatcgcggcatcgtggtcgattgtcacattttcctgcgtgcagacccactcaaggcgccctgcgatgtcctccggcgcgatgcggcggaagtcaaaacgctgacagcgcgataaaatcgtcggcaacagcttatggacttcggtcgttgccaaaatgaaaatgacgtgtgcgggaggttcttcgagcgtttttaagagggcattgaacgccgaaacggagagcatgtgcacctcatcgatgatatatacgcggtatttcgccgtagtcggtgtgaagttggattcttcaatgagcgcgcggatgctgtctacgccgttgttgctcgcagcgtccagctctacaacgtccaaaacagagccgtcatccagtcctctgcacacgtcgcacttgccacatggatcgccgttttggggatccaagcaattgaccgccttcgccagaatttttgcgcaggtcgtttttcccgtgccgcgcgagccggtgaacagatatgcgtgcgaaatgcgcccggccatcagttcgttttttaacgtgaccgtcacctgcggctgaccgacgacatcggaaaactgctgcggacgatattttctgtataacgctttatacaaatggcggcgctcctttctttgtgggtaataaaagaaaaagacgattggaacgtagaatatgtgaacggacaggcagcctgcatcgcaccagacgatccgcttaatgctgctcggtcccccgcctgacatggttcacggtgtctcgccgcgcagacctgtccgctcgcatattccacggtatattccaaccgccttggctttttccgtgcgcggaacatacttgaccgcgtactttagtattatacacgttttcccttgaaaaggcaagcaaaaaatcgtataattttgtatatgttcatatttgtaacgcgcacatgggtttttttgcagattctgcgcggcaaaacgggaaaggatgaaagaaaatgaagatcagaaatgcagagctttgtgacctgccctatctgcttgagatgctggaaaacgcgaaagcttcgctgcgggcgctcggcatcgaccagtggcaaaacggctacccgaacgaaaccaccctgcgtgaggacattcaaaataaaatctgccgtgttgtgatagacgacgaaaacaatattcttgcaagtgccgccgtgtatgtgggcgacgagccgacataccacgaaatttataacggcgcgtggcagacagaaaacaaaatctacggcatcgtgcaccgcattatggcggcaaataatgcgaagaagcgcggcgcggcatcgtttttgatgacctactgcgcgaaactctcgcttgaagcgggtgtcacttccatgcgatgcgatacgcatcccggcaacatcatcatgcagcacacgctcgaaaagaacggttacattcgctgcggcatcattcaccttacggacggcgcagaccgctttgcctacgaaaaagttctgaaataacgcacaacagacacaggccccgacgagcatgacaaaacgctcgccggggcctcgctcattctatcctgttatttctttcgtccggtaaaataacaccttgcagcatcatcgaagtacgcggctttcgtcgcgccggtcaaaatgcttacatagagatcaggccgaatgcgttcatgacagagctgataaggatgatggctgcaaagatcgggcaaagatacttgatcatcatgacgaagatcttctttctgcggaacgtgccgccttcttgcgtcatttcttcttcaatacggtctacaccgatcacgcgggaaacgagcaggcaagtcgcaatagccgcaatcggcatcataacggagttcgttaagaaatcgaagaaatcgaggaactgcatgccgagaatctttacggcatcgagcgggccgtagccgagcgaagacagcgtgccgagcgcgagcatgatgatgccgatgacaacggttgactttttgcggttccaatggagttcatcttcaaacgtggaaacggcgctttccgtcagcgcaatagagcttgtgaccgccgcaaacagcacgagcacgaagaacagaatgccaaccgccgtgccgagacccatgctagcaaacaccttcggaatcgtgatgaacatcaatgacgggcccgcctgcaaggtgttcgggtcgccgccggagaacgcaaagactgctgggatgatcataaggccggccataatggcaatggcggtgtcgaaaatctccacattgcgcgtagagtcctcaatggacgtttctttcttcatataagagccgaacgtaacaaggatgcccatggcgatggacagcgaatagaacatctgtcccatggcggaaacgaccgtcatccaggagaaattctcaaggttcggcacaaggaaatactgaatgcccttcagtgcgccgggacgtgtgacggaatagattgcgatgatgacagacaacacgacaaggatcggcatcatgaatttcgatacacgctcaataccgttgcgcacgccggcaaaaatgatggtcagcgtgatgagtgcaaaaacgataaagcaaatttcggcggacacgccgtccgagatgaacatcgaaaaatatccgtcctccgcaagctttgttccgttgccgcaaatgtactcaaaaagatatttgatgacccagccgccgataacggaataataaggcacaatcaggattgggataatggcgttaatccagccgccggcttttaatgtgtgcgactttgtgaacgatgcatatgcacccacagggcttttgcgcgtcatgcggccaagcgacgtttctgccacgatcatcgtgtaaccgaacgtcagcgcaagcaaaatgtagatcaaaaggaaaatgccgccgccgtattttgccgcaaggtacggaaatcgccaaatgttgccaagaccgaccgaagcgccggccgcagacagcacgaacccgagtttacccgagaacatgctgcgattactgtgatgtttcttcattacttctccacctattttctgcgaatattcaaacacagccgccggtgaaaccgttttcccccttcagtttcaccggcgtgctgcatcaatacgttcagcataccacataagccgcaaaaatgcaatatcttgctttcacaaattcattttgtgttttctgtttatattatgccttatcatcggcgctgcgcttttttcacccagtcgagtgcaatccagccgccggctttgagacgtccccagccttttgcagaacccacacctgcgctctcctctacaaccgtatagcgcttcgtgtctgtgatctgcccctgcacgtcataattcgtacccggacccttgcggatattgagcgcgtctgcagcgtccttgcgcactgtatacgctttgaacggttcatacacaattttgccgtttgaggcatacactttataacccacagggcatgcgtttttcgcgttttccagcattgcatacgcgccgatctggctttttgcgtccgaccagcttgtccgcacgcggtaaagctgctttggcacgggtttcgcatcggtctttgtctcctttttgtcgtccttcatttcgctttcaaccatttttaaaaaccgcgcccagcccttgtcgagcgtgcggtgcggacaatatttgccgtcaaagtcctggtgctttttcaggtgagaaatatcccacccccgctctttcaagagtttcgctgcgtattcagctgcgttcttttcagctttatcgaacttagcaccgccagacagagaccagcaaatttcaatgtgaatgccgtgcgcatttccgtcgcgctgccctgccgcaaacgcacctctgttcagcggaatgcctatgacaatctccttgtcatcgaccgccgcattaaacgacgtagagctgtcgttgcgaatcatatacgcgacttcattcgcggcggaagcatcgttcgccgtgttgtggacgacgatatacttcatgtccttagcgcaggactccaccgggactttcaaatcgtatttgcccgggttaagtaagttttctctaatcggtaccattatttttcctcctctttgcttacggtgttcttcagccgctccagtaattttgtcagccgcggaaaccccggcacgccgatggccgcaagattttccatgacggaaataagctcgttgatgatgagccagatcgcgaccagcagaccgcagaaaagctcgatgtgcaggtcgatgcccgcctgcaccagggcaccgcgcagcagataatccacgcccgcgccgaccgccaccatcgccatgtagcagagctttttgagtatccccttaataccgaacttggaatttaactcggcgcggatatacgctttgatcatgccggtgatataatcgagcaacatcacgccgagcaacacgagcatcggcaccgcgagcgtaccgaggtacgatacgagtcctgcgccgagcacggccgccgtcgtctttaaaaccgtctgtttcatcaaacctttgccctccttcccctgctattgggacatgcacagcgctttgtcccgcagcatactatgacagacgtgctgcttttgtgcgcgacaatcagaaaaagcggcgaaacacgttgcggaatgtcaaaatctgtgttatgatttcggtggacaaatattcaaatatgcaaaggagattttcttatggtctgcaaagattgcggtgcaaatattccgaacggtgagcttttttgcccaaactgcggcacgcgcaccgaaaacgcgaaattctgtaaatactgcggcgcggtcatcggtgtcgactgcgtggtttgtcccgcgtgcggcaggcaggtagagccattgcagtctgcccaacagccccagcctgtttatgtaaacaacaatgtcacttacggtggtgtggcaaaaagcaaatggacagcgttttttctgtgcctgtttttaggactcatcggcgcgcataaattttatgagggaaagatcggcatgggtgttttgtatatcttcaccggcggcctgttcggcatcggcgcgttcgtcgatctcatcgtcatcctctgtaagcccggtccctattattccgtttaacttactcagaaaggcggcgtactatgccaagcattcttgaatatgcagaaaccgaattctcgcctttggcagaaaaaccgtttacggatgtagacagcctgcttttatcacagttttcctacatgaatctgagcgcgtttgaagacgagcttaaatgcgaaaacaaaatagaaattcgagagcttttaaaggcagagcgctttgaaaagttgatgttccacgtacgcgataccaaaagcaacatgaggcttttgtacgctatggcgtcaagcccgcgctggcgcaacataaaaatcggcaacttcgttgaaaagctgtgcgaccagtcagaggagcagtttgcggccatcaccgtatacctcgatgacgaccacgcctgcgccgtattccgcggcacggacgccacgcttgtcggctggaaagaggattttaacatggcatttctgcccgtcatcccctcgcaggccgatgcggcagactatgtgacaaagctcggcgaaggttttcccggcaaactgcttttgatgggccactccaaaggcggcaaccttgcagcctacgcgggcatgttctgcgacccggaaattcaaaagcgtattgagcgcgtctacccgctcgacagccccggcttcatcggcaacacgctcgaatccgaagaatacgggcgcattcaaagccgcgtacataaggtcattccgaaaggctcgctcatcggcatgctgcttgaaaaccacggcgcgtactctgttgtggaaagcaaccaaatgggcatcatgcagcatgacccgttctcgtggcaggtgacggacggtgcatttcatacgctggaggaaatttccagcggcgcaaaatacatgaacaaaacactcaacagctggatcaccggtatgagcatcgacgagcgcatacgccttgtcgatgtactctacggccttttgaccgccggcaatattgaaaacgtatttgacgccggcgacattcaaaagaacatcggcgctatctacaacgccgccgtgcacctcgaccccgaaacgcggtcgttcgttttgcagatcatccgtcagcttgcgggctttgcgttgcacaacatcccccacccgaatgtcccggaaaacctcaatatcctgcccggcaataaaacgcagaattaaattttcatagagtaaaagccaccgtttgcggcaagccttgcgcttcaccgtttcggtggcttttgatttatgtttacgaatttataagctggcggtagatgagatccatgatcgtgatggaattgagctgcatcgttagcacattcatcgtgatcttgcagaatttttcagattcctcttctgcatcatccgttcccctgttttccgttctgctttatttcacgtttccgctgttgatgcccgcgcctgttctattaagcggcagccagtcgagcacctttttgatgtacgtatcccagaatacccagtcgtgcttgccggggccctccacatacgtgaggtcaacaccgttttcattgaggaaatcgcggaaatcgcggtttgcggtgacgaggccgtcctccgtgccgcagcacaggtacattttcggtacgggtctgccctcctccttcagcttcaaaagcagcgccttcgggtctttgtcgctgcccttcaccttgtcatactcaccgaagatcacctcgtagtagttgcggcggaatgtgaaaatcggcgcggagttgtccgcgtccttccacgtatcgtgcacgagcgcggcggaaagaccgatgacgcagccaaagttttccgcatacttcaggccgttgcggattgcaccgtagccgcccatggaaagacccgcgatgaacgtatcctcgcgcttgtcggaaagtggaaacagctttcttgtgaactctacaagctcctttccgatgaactcgccgtacagctcgccgctcttttcgtcatcgagataaaagcggttttcaccggagggcataatgaccgcaaggtcgtttgcctccgcccacgcctgaatgcgcgtgccattcacccagtccgtataatttccgaaaatgccgtgcaaaaggtaaagcgtcttcagcggcttctgctctgcgttttccgcctgcgggccgaatttgtccaccgggatgatcgcgttgaacgtcaccgtgcgcatgaggcacttcgagataaaattcacttcaataattgccatatcaacaactccgtttcggtttttcttttattataatcaataaaaacccttttgtaaaggctacttttatgctatactgtacaaaacggtttgaaagcaaaggaagttgaatactatgaacgatttttccgagcgcgtgtttcaggtggtgcgcgagatcccgcgcggcaaggtgacaaattacggctttgtggcatttgcagcgggcaacccgcgggcctcgcgcggtgtgggctttgtgctgcaccgcaacacggaccccgtaaatacgccatgccaccgcgtagtgttcaaagacggctctctgtgcaagggctacgttttcggcggccccgatgtacagcgcgaaaagctcgaagccgagggcgtacggtttctgcccgacggtcgcgtagacatgaaagcctgcggctggttcggcgaaaacgaagaataacaaaaaggtgcctgaccaaaatgatcaagcacctttcgtttttactttaaagatcagccgtagttcttaaagctgacgttaatatcgactgccgcatcgatgccctgcacctgcgcgttgtcggaatactgccacaggccgaagttatagtagaatgccggcacgctgcggtattccgcaagccagaactcaaaatccttgagctgctctaagtcataatagttatagccaagactgcggttgaagtacacacctgcggtgtagcccgctttcgcgatctttttgcagaacgccgaagcataactcgtgatctgctcgcccgtggcgtctgccgtgcgagagccgtctacgctcgtctgctcccagtcaaagacgacggggtaatcgacggacttattctgcaaaagctggagcacatagcccgcttcctcctccgcttcggtaacagaagttgcctgcgagaagaagtagatgcccacctttacgcctgcgtccttcgcgccggtgtaattatcggcaaacttgctgtcttcgttcagcttgccgcgcgttgcaccgcggtagcctgcgcgaatcatcgcgaaattgatgccgctcgctttgacggctgcccagtcgatgtcgccctgatagtcggaaacgtcgatgccgaggctcgcgttcgcgtcgtcatacgtcacaaggccgttgtcatttttaaacttcgactggtcgtatgtattgagcggcacattaaacttcggaatggtgatctcaccctcgtaaagatcctgaatgacgagcttgccgtcctccgtcactgcggaagatgtgccgttgccggtgctctgcccgtcggatttcccgccgaacgcggataggagcgataaaatgaccacgaccagaatgagcacgccggccgcgccaaggaaaatcaaacggcgcatttcaaaagaacgcgcgtcgctatgtttatttggagctttattattcatagtaaaattacctttcataaacaaaatcacagcgtaaactgcacaccgtgttcggatttattctattatacgcattttctgtcctttttgcaagccattcggcgaataaagtctgccttgccaagtatttcccactgccatctcgcggtctatcgtgccgagtacgcggattttatcgcggctccacaggggcgcaagcagctttgttttgtcaccgtcgcccgtaatgcgctcgatgaccgtttcgggcggcagcacctccagttgacggattacgacgcgcacatagtcctcaaacgtcatcggcgtgtatgcgccgctttcgtataagcccgcaagctgcgtgccgcgaatgacatgtaaaagatgaattttcacaccgtccgggcgcagctgtgcaaggtcttcgacggtctttatcatctccgcctccgtctcgcccggtaagccgtctatgatatgcacgcaaacgcgaatattgttttcgcgcaggcgcagaaacgtctctttaaatacctcgtatttatatcctctgtgaatacgcgcagccgtctcatcattactgctttgcaggcccagttccacggcgaggtgcgttttgccgttcaattcttttaaaagcgacaaaacatcctccccgatgcagtccgggcgcgtggcaatcgatacgccgtaaacgccgaatgcaagcgcttcttcgtataacgtcctgagcttttcaaccggcgcgtaggtgtttgtgtgcgtctgaaaatacgcgatgattttactttccggcgactttttatgaatacgcactttttccgcttgcagctgctccgtgacggaaagcgccttatcctgcgtaaaatagccgctgccgccgtcgcagaagatgcacccgcccacgccgcacgtgccgtctatgttcgggcagctcagcccggcatcgatcacggccttttgggtcttgcaattctgcacccggttgtgataagctaatgtatgataccgtttgttatcaaacgtatacggaaatggattcaaagtaaagctcctttgcttggtccaaaataataataggagttgagtatttgttacacattaaaaaactgaatttagacgaaattcgcgaaatttacaacgcatatatgcacgaggcattcccgccgagcgagctgcgcccctttgcaagcatggaaatgctctacaataaaaactgctatccgtgctacggcttttacgacgagaccgattcactctgcgcctacgcctatttttcgtgcacggaaaacggcaaatacgccctgctcgattatttcgccgtcaaaaaaggcctgcgcggcacgggcatcggcagcaagacttttcccctgctgcgcacagaaatgaaagaccgtgacggtcttttgctcgaagtggaaagcgttgagagcgccgaagccgaagaagaagtcaacatccgtcgccgccgcatcgcgttttatgagcgctgcgggtgcgaaatgacaaaagtcaaaagccttttgtacggcgtggatttcaacatactcgtgctgcccatcgcgcagcccgtgccggaagcgaaagtcgtgctgcatgagctcgaaaacatttatcacgttatgttcgacgacgaactgtacaagcgcgtctgtcacccgtttatcgcggaataggcagatttttgaattgactttttcgcacaaaagccatataataaagccataaaccatacggaggtgtaagcatgccggaagaacggaaaacagcagaaaccgaacaggagcgccttgcggattttccgcgtgatctaagccgcagcttcacctatctgcaccgccagcgtaaaaaatatatggatgaccgtctgcgcggctacgactttgtaggtggcatgccgatgatcctgctttacatcaaccgccaccccggcaccacgcaggacgccatcgtctcacacatgtatatcgacaaatgcaccgtagcacgccgcacaaaacgccttgaagagctcggctacatttcgcgcgaaaccggcaaggaagatcgccgcgaaaacaacctctacgtcacggaaagcggcgaaaagctcgtgcccgtcatccgcgagattttgcaagattgggccaaaagcgtcacgcgcgacctttccgatgaagagcgcattttactcatcacactgttagaccgcctcatccatacggatgtggaataaaatttcacttgatatggactaccccgcagttttaaagctgcggggtgtttttcattgaaaaagctccgggaaacacgccttttgttccgccgaaaaatccgtctcgaccgttttatcgatgtcgagcgccgggcataaaagatgcactgcacggcagcaaagcatctggtgctccgttctgtccaaatgaccgccgtaaaggtcgtcccccgccacgggatgcccaaggtgcgccatgtgcacgcgaatctggtgcgtacgcccggttttcaaatggaagtcaacgaggctgtacccgccgctcgttttcactgtttgaaattccgtcacggcttcgtctccgatgcccgcgcagcgctccaccttatgccccggctttaacccgatgggcacattcaaacgcccgctttcgggcgtttcgccctcgcacacggcgcggtacgttttcgtcagctttgcgtttgcggcaaatttgtttttcgccagcaccagtgcgccggtcgtatcccggtctaagcggtacaacggccgaaacacaaagtccggcgtattttgaaaataccacgccgccgcatttaaaacgctgtcgcggtcgtgccccggcgaggggtgcacgggcatattgtacggcttatcgagcactaaaaaatcctcgtcctcatataaaaccgcaaacggcaggtcggctttttcatacgcttcgcccgtctcaagcagcgtcaaagtcagcgtatcgccggctttcaaaacggcattgctgtgcacgggttcgccgtttttaagcatctctccctcatatttcagcgccgttaaaatgcgtgcggaaaaccctaagtaccgccgcacaaacgtgcgcacatccatattttcctgtccgcggtcgatgacgaactccagtgtgcgtttcattacttgctgcgcgtcgcgagcttttccgcaaactcgtgcaggaacgtgctgtccgcgtcaaacgcgtcaagcgcatgaagcgccttttcggtatgctcatcgacgagcgcctgcgctttttccacgcccaaaatggaaacatacgtgcagcgcgcgttttgtgcatccacgccgatgctcttgccaagctccttggcgtcaccggtcacgtccagaatatcgtcgcggatctggaacgccaaaccgatgtgcagcgcgtattcctttgctgcattgatctgcgtttcgttcgcccccgccgcaatgcaacccatcatgcatgccgccatgatgaggttcgcggtcttgccggtgtctttttcgcacagctcatcgagcgaaacggtgcggttttcggttgcaaggtcaatgcactggccgcccaccataccgtgctcacccgcgcagcgcgcaagcaccgccgccgcatacgcagcgcgctccatgccgacatttcggaatgcttcactgctcagcgccgtttcaaatgcttttgtcaaaaggccgtcgcccgcaagcaatgcgtaattttcaccgtagaccttgtggttagagggcttaccgcggcgcatatcgtcgttatccatgcacggcaggtcatcgtggatgagcgaatacgcgtgtaccatctccacggcacacgcaaacggcatcgccatgtcttcatcgccgccgcacagctcgcagaacgcaagcgttaaaacggcgcgcacacgcttgccgccgtttaaaagcgaatagcgcatggcgtcggtcacggtctcggaaagcgagcccttgcgctccggcaaaaaatgatctaaggctttttcaatgcgttttaccctgtcttccatttttattcctccgttttcgcagcactcagctccgtaattttctgttcggcagtgtttaatttctcatagcaaaagcgggaaagctccgcgccctcgctaaaaagcttcacagattcctccagtgtcacatctcccttttcgagcatctcggtcacctcgcgaaggcgcagcatcgcgtcttcaaaggtcatggtttttttaggcatcggtcatttccctcttttctgttttctgcacctgcacggtgatcgcgccgtcctctacgcgcgctgtcaaaacgtcgcccggctttgcgtcttccgtgcgctttatcactttcccgttttcgtcggacacgatcgcgtatccgcgtgaaagcaccttcagcgggctcattgcgtctaaccgtgcggaaagcgcagcaagctcgtttttctcattcaaaattctgcgctcggcgctgtgcgtcaggctctgcaccgtgtttcggagcgcctgcctgcgcggtgaaagccacgcagacgggttttgcagcacgtttgcgcttgcaagcgcatcgagcatctgccgccgatcgtcaagccccgcctgcacactgccgcacaaacggcgcgtcagctgcgcaagtgccgcacgcatttcttccctgtccggcacggcaagctctgccgccgcgctcggcgttggcgctctcaagtccgcgacaaaatcgcaaatcgtaaaatccgtctcgtgccccacagcggagatgacgggtatcttcgacgcgaacactgcccttgcgagcgtctcgtcgttgaatgcggccaaatcctccgcggagccgccgccgcgcccgatgatgatgacatccgccgccttttgggcgttcatcaatttcaccgctgccgtaagctgcgccgctgcgtcctcgccctgcacaagcaccgggcaaaacacaatctccgccgcaggccagcgccgcgagagtatgttgcgaatatcctgcaccgccgcgcccgtcggtgacgtgatgacgccgatgcgcgccggaaacggcgggatcggccgcttgtgttcttccgcgaacagtccctcggcagcaagcttttctttcagctgctcaaacgctaagctcagcgcgcccacgccgtccggctgcatttcctccacatagaattggtactgcccgccgggctcatacacggccacacgcccgcgcacgataacgcgcatgccctctttcgggcaaaaacgcagccgccgcgcggcagacgaaaacataaccgccttcaaaacggacttttcgtctttcagcgaaaaatacaggtgtccggagcggtagtgatcggtaaaattggaaatttcgccgcgcgcgtaaatatcgcgcatgcggccgtcaccttcaataagcgactttataaaaaagttgatctgcgaaaccgataaaacgtgcatatcaggcctcctgcgaaagtgacgccaaaacggcgatgccggcagcgttatccgccgaaaaacgcggctccgcaaacagtgcgccgtactttttgctcatgtgcgcgcgcagcatggagtttgaggacacgccgcccgaaaacaccacgggcaaatcgccgaatgtctcgataagcgccttacacatcgcgtccgatgccgcaatgacgtacgccatgcacgtcgcggcaatttcctccttcggcgcgccctttttcatcagctcgcggcacttgttttccacaccggaaagcgagcagttcgcgcctttcatcgaagcgcgcacgcgcagtttttccgtgtaattgcacgcaatggggtctaaatgcttgccggccggaaacggcagaccgagcatcacgccgatgcggtcaatgacctgcccggcctttaaatcgagtgaagacgcaacaaggcgcgtgcgaaacattttgtcaccctccacaggttctaccaaaaccgcttccgttgtgccgccggacatgtgaaacgccaaaaagcgctcgtgcagcaagtccagtctatcaacagagtaaagcgccgccgcaatatgcccctgctggtgcgaaaagcgccgcagcggcacccctaacgcctgcgcaagcatctgcgccgcgccgatgccgaccaagaagcacggcatataggagtccttcgcatcacgcggacgctccgaaacgccaatgaccttcgccccgccgatcttatcaccgagcatggacagcacctccggcagctggcgcgtgtggtggaacaccgcgtcgctctggcgcagtccgatctcgccctctttcacaggcaaaatcatgccgcggctgtccatttcgccgtcgccgaaaaacgcggcgctcgttgtgtaattgctggtgtctaaaccgagcgcgctgatgttaggcatttttgctctccgtctcgttcttcgctccctcaagcttctttgcaattgtggagagtacgccgtttacgtaagaagcatccttttcgttgccgtaaatttttgcaagctccaccgcctcgttgatggaaacgctcaccggaacatcgtcagcctgcataaactgcatttcgcacacggcaacgcgcaaaatcgtcagcgtcattttagaaaggcggcgcaaactccagccgcgcagattttcttcgattgtgtggtcgatctcgtctaaataaagctccgtcaaagcggtcagcttttcgcagtacggatcgataacgacatcgcgcgcttccttcgccatttcaatgatgtcttccatgctgtcgccggtcacggtcttttcaaaaagcagcgtaaaagcctgttctctcgattctcttctttttgtcatactcggttcctttcccttatctcaataaaattcattgcgtgattcatggcggatataaacaaaaaaagcccgccgaaggatcggcaggcaatttgagcagaaatcgggcactttcggttttcaccggtgccgtttgatgtgcagttttcaagctccagacatacacgccgatatgttctggaatagtataccacgataaacggtaaaatgcaagaaatcatcttttatttcgccgcagaaatgatcttcacgttttccgcgctgacgccgctttcggaaactgcaatgtcccgcacgatgagcgcgttttgttcgtcctccatgtcgccgtttacaaccaccgtgcagctctcgccgttgatgtacgccacgcactccgtaaagcccttcgcttctatgagggactctatgtttgtctctttcaaaatgttctgcgcgataaccgcagcttcgtccacggcggcctgctttacggcgacctcggcgctgtcgtctttcaggatgtcctccagcagctccacggcctcatcccgtgcggtctggcgcgtcaatcgagcgtccgaaagctttgcggaagacgataccgcagccgctgtttcttctgccgcgctgctttccgccgcaccgtctgcgggctccgtttccggcagaacgccgtcctcgttcataggcgtgtcggagaccgtctccacataggcgttgttcacaagctgcgccgcaccgagagcggaagacgcactttcctcgctgacatcgcccgcgctctgcacctttgtgcccgcaaactgccaatttaagtacactgccgcaccaagggccagcacaagcgatgccaagatcagctgtcttttaccgtatttcattccgtgttcctccgatcttcactgaatggtttcattcgttgccatatgtatattcgctgtaccccaccacgcatacctgcgtagaggataaatcgagcgcagtcttcacggcctccacaatcttctcccgaattttcgggtcgcctcccccgcggctcacgactaccacaccgcggatctccggctctgttttcgtcacgatgagcggcttctgcgagccgtccgccgccttcaccaggatatacgtcttctgcgtgtcgccgtccgtctgcgtgcggttgaggctttcgccgctgtactcctcggcgcttttttcgctctgcttatcttcagtcgcatacaccgtttcgcccattgtacgcagcgtcaccgtcacctgcggctcgctttcccccgtgatagccgagaccatctgcgcgatctgcgcggaaagcgctctggtgtagtctcccgccgtcagttccaccgcctccggcgcttcattttccgtgttctttgtgtccataggccaaaggagcatcaataaaacgagcgccgcgcaggctgcaatgagcatatacgtcagcttaccgtttttcaaaaggcttttcagtttatccgtctcgcctcacctcctacacgtacacatccaccgggatggcctcggtcagcacgctgcgcaaaagcgcgtccgcgcggtcgatgtctgtcgcaaaccgcacccgtacccgcacacgttccaccgtcaccatgccgtcatcgtcctgcgtgtaccaaatgtcgatattcgctgccggcacgtccatccccgcacttttcaaaagcgccgagagccgctctttcaaaatcgccgtgcccttttccgcgtagctttgcattatcgccgattcggcttcgcccgtttcggtcaagtcaaaatcgagcgaggccccgctttgcagctttaaaatgccgtttacaagcaccacaagcagcatcagcgctgcaagcgcgtggataagtgacccgcttttttccgggaacagccgcacgatcatctccgttccgatgagcaccacgcacaccgaaaacaccagcgcatacaattcacgcataagcacctcgcacacaaagcatcacggccgccgagaccaccgccaccgcacccacactgcatgccgccgcaatgagcagccgcagcgccgcagcacagccgtttaaaaacgacgcaagcggctttaggcccaacacctctgccgcaagccccgcgcaaaagcaaatcaaaagccacgcggcagcctttatgcacagcggcagaaaaatcgcgagcgatgcaagcaacccaaatgcacccacgccgttttttacaagcgccgcgccggaaacgatgaccgaaaacgcatcggaaaacgcgctgcccacaatagggatcgcgccggagacaagcattttcgccgccttgccgcccgccatctccgcgctgttcgcaacaattgtctgtacggacaaaacgcccgtatataccgtgacggcgagcaccaaagaccatttgataactttatacagcgcgtccgtcagccgctttaaatcaaacgatgtcacggcagaagccacggaaaacgccaaaaacacacgcaaaaccgggatgagcaccgcgctgctcaaaaccgagacggcatttgccgctgcaagcgacagcgcgccgtaggtcggtgctgtcacggtgttccccgccgtgaaaagcagccccgcatacacgggcaccgcggcaagcagaaaaacggcagcagcatccgtcacgcgcgcggcctgctccaaaagcgaagccatcggcgaaagcagcgtcacgacagcgcacagcgccccgcatacggaaacggcgtaggaaagctcctttgcggcgaattcctgtacaagtctgcacagcacgcatgatgcaagcagcgtaaggagtgcccgcgccggtgctgtccactccgcacgaaagccctcggaaagcgccgaaaacagctttgccgccgcgtcgggcgcaggcgcttccatcgggtcggccccgacgttctgcaaaagcgactgtgcttcttccggcagcgcctccataagtgtatccgccccgctgttttggtagagctccgcttcgtccgcgcgcacgggcagcgaaagcagcaggataaacaccgtcaaagccaaaaaaacgcgcaaaatccgttttttcataacaacagcacttcctgcaaaagcgagagaagtcgattcagcaacggcagcgccgtcagcagcaccgctgtttttacagcaagctccacaccgcttgctattgccgattcccccgcgtccttgcaaagatccgccgttatgcgcccgatgagcacgatgccgagcgcttttaacagcactccgaacacctccggcatgccggaaagctccgcccattcgcgaaatgtcgaagtcagcgtttcgatctgcggcaaaatacacagaaaaacgagtaccgccgccgcaagcgaaaacagcagagctatttccttttgcccgcgttttaaaagcgcgccgcacaccgctgcaaacaccgccgctgccgataccataagcaccgtgctcatagcccaaacaccgatttaatcgtatcgaacagcgtgctgatctgcgtgatgagcatcgtcagcaccacaatgagccccgcaagcgtcgtcatcatagcctgctcctcccgcccggagcgaatgagcagctggttcaaaacggccacaagtatgccgatggcggcgatcttgaagatcagatctacatccatagctttactttcctttccggctgttacagcaaaatgagggcggcggaaacgccgacaaacagtcccagcgccacgcacaatctgcctttctgggcaaggctttgctcggcggctaaaagtgcgctgcgcacgcggccttcatgcagcgcaaagtacgccatttgcccatcgaggtcggtcttgccgaacccatcgataaacgcggcgcacagcgcttcatccccgcggtatgtaaaaaacgcatgtgccgccgctttaaacgccgctgtgcaatccatgttttcagaaagcacccacacgcgcctcaaaaaagcgttttcgcggcacagagagagcagcgcgtacaggtcgcccgccgtataggccgcggcgtttttcaacgcaaaaagcgcttctaagaagatgttcagttctttttcacgcatttttagccgcgcagataccgatgacccggcggtcgccgcgcacagaacaatcaggattgccgccgttgttttcaagaagatcacccgccaaaaacagcttttccactttcgtcggcgcacttcgcccgtgcagcagcgccaccgtttcaaacgcgccgagcgacagaatcccgcggcacagcggtctgcaacacagctcatgtacactgcccgcgtggatactcgcaatcagcgccacccctgaaaacgatgccgcacgtatcgccgaaagatcgttttcgccgagctcatcgcagacgatgtactccggtgaaagacaccgcaccgcgtgcgaaagcccctcctgcttcgggtagccctgcaaaatatccgtgcacgcgccgaggtcaaacccgtccgcactcagctcaaaccgctcgtcaagcaccaccacacggtgtcccgccgtaccgatatatcgtgcaatgtcccgcagcagcgtcgttttgcccgaggacggcgcgccagcaagcagcagcccgcggctgaggtctacgccgcagcgcagcacctcctctgcacagccgcgcttctcccgcgggatacgcacagaaagactcgtcacgtcgcgcaccgttttgataccgcccttttcgatcaccgccgtaccgccaatgcccacccgcaacgcgcggtctgcggagacgaatccgtcacgaatctcctccatgtgactgtaaacggaatacccgcacagccgcaaaaagatctcctccacgtcctcgcgtgtcgctgtcacattgttttgcgaaaaatactgcgccgtgtcgccgttttcccgcaaaaacaaaatgcggtcgccgcagcacagcagcacaggcttatccacactgatacgaatgtcaaacaccgcgtcgcgcaccgcctgcggcaccttttcaagcatcggtgtaaagcgcccgagcgggcggattgccttttcaaaatccatcgcacacacctttctttccgctccgtatgcccaattctatggacgtgccgccgggtttagaaccaaagtgaaagaaaacgggccatcgcctttttataaacgtgcctttatgcctttgaaaagtgcgcccgaaatctgccgcgatttttcaaacatgaaaagcaccctgcaaggctaaaagctttacaaggtgctttctctatgggcaagctatttactttgaaagtccgctttgatacaagctgtaaaagtggttcgtcggccccgcgccgtgcccgagctcgagcgcgtgctcgatggcgcacgtcatatagtctttcgcacgcttcaccgcttcagcgggtgcatatccaagcgccaaattcgaggcaatagcggaagacagcgtgcaccctgtgccgtgcgtgttcttcgtttgaatgcgtcttgatgtaaagcttatatgctgttcaccatcgaacagaatatcgatcgggtcgcctgcaaagtgtcctccctttacaagcacagctttacagcccattgtgtaaatcaactttgctgcagcacacatatcgtcttccgtctcaatgtgcatcccggtgatttcctccgcctcgggaatattcggtgtcagcacgtcggcgagcggcaaaatttccgctttgaatgtctcaatcgactgcggagccatcagtgccgttccgtctttcgcatacatcacaggatcaacaacaacgttcttcggacagtatttgcgcagcttttccgccacagcagacatcacctccggcgtcggcagcatgccaatcttcacggcgtccgtaccgatatcctcatagattgcgtccacctgcacgcggacaatctccggcgcaatatcctgctttttcagcacatgcacggtgttttccgccacgacggatacgatcacgctcatcgcgtacacgccgtgtgcggatattgtcttgatatccgcctgaatacccgcgccgccggagcaatccgacccggcgatggtcagtacgcgcttcattgcactcatcacagcgaaagttcggaaactgtgaggttctgcacctcaacgggatcctcggcgtgaatcgtgaacgtcggcttcgtctcattcagcacatgcgcgatgaccgtgtttgcaacgccgttcaaataaatctctacgctgttcgtatcggtaatgatgtccaccttcatcggctcgtttttcaggcgcggcaatatggattctccgcaggtcagaccgtttttatcgagcttcatctcaaggccgtacaaattgcatgtaaggtcgcattcctttacagtaaaggagatgcggcaagttttgctgccgagctcgtgcgtgcagtgtgtcagtgtaaagtcgtcaagcttgtcagattttacaaccagattttctgtgctcttgatcggcagcgcagagagatagtagcggtcgccgtgctttttcagcgtcatttcggtcggcgtacacatggagccgttgaacggcgcgccgggaatatcgctgcggttccacgcaaagcggatgaccggcttgcccggctcatagtaatacgtctgcgccgcatacgactgcgagttatacgaaagctgcccgaccgactgaatcggctggtaaaggccgttttcatcaaaatcaccgacaaaatacatgtcatgcgcaccggaatagacccacagcgttctgccgtcatctgctgtaagcggatagagatccgggcactcgtcatcaccgggcaggtcaaatttctgcagaagctcccagtgcagtaagtcctgcgacgtgaagattgcgtaggtgcgctccacaaaatacagtgccatcagccagcgcgcgcgctttgcgtcgtaaataaccttcgggtcgcggttgccgggtgcgatctcgtcgatcagcggatttttgtcatactttttcagcgttttaccgccgtctgtgctgtacgcaaggcactgtgtgctctttttttcgcccgcgcaggtgtaaaagaacaagattggcgtttcatcgccttccttgaggccggaaacattgttgtgatcgactaccgcacagccggaaaacattgcgccgtccatgtcaaggaacatcgcttcttccttatattcccagtggagaagatccgggctcacggcgtgaccccaatgcatgttgccccacagtctgccgtagggattgtgctggtagaaaaggtgatactgtccgccgtaaaagcacagaccgttcggatcgttaatccagccgcgctccgctgtaaagtgcagctgcgggcgcaaaacggtctcttccgccgtaagcggcgtcatggcatcctcaaacaccggtgtaaatgcgcactccggctctaccgtgacagtcatcgtcttaccaaggtaatcgcgcaggtcggcataataaaccgcatctgcgttttcttccgtataaacggcatcgaacttataaaccggtgtgccgttttcagaaaaagtaaatttgtgcgaagtgccgtcaaatttcaccggcacgcgtagaaaacgtttgctgactgtaatttccataaactcaagctcctttagccgttatcggtgcattaaaatgtatgcaccacatttattcgaggatattgtagcacaccgcgcgaaaaatgtcatgcatattttgcttaaatttgcgaatttttccgccgtgcaaagccaaactatgtgcgctgcagatctgtaaagaaaaggcggtgcaaaggtggcaaagcgcgtttggaaatttgtaaaaagcaaaaagatatttatcgtattactaatactgtatacggttgtctttattttggcggttcgatttatttttcatattctcccgattttgcttggcgggctgcttgggtgggtcacagcaccgctatgccgcctgctggaaaaacggctgcatctctcccataagcgcgccgcactttgcactgctgtcgccgtttataccgtttcactcgtccttcttgcattgcttttcacgcggctcatccgagaaagcgccgcgttttttgcttccgggcgatactttcgctacgaagcacttgcccccgccgtgcggtcgtttttggagcgcacatggcaggaattgccgcagtggatctccgctgcgcagaagaatttttcgggtaacatgggtgccgccatgcccgcgctgcaaggtaccgtaaaggcgattttgctgttgcctgccgtgtttttaacgctcacactcatcccggtttttgcgtatcttaccttgctgcaccgtgaaaatctgctgtcactttcaaagaagctcatcggtgaaaagtgtgtagaaaacctgcaaaaaaccgcaaaaagcgaatcttccgtcgggtttgtttctgcctatgcactcatttacaccatcacgtttgcggaaagctttgtgatgctccacctgctgcgcatggaatacccgctgatgactgccgccgttgtgacggtctccgatattttcccggtctttgggccgggaactgttttgctgccgctcgccgtttaccgattgttatgcggcagcgcggcgcaagcactcgggcttttcatcggatggatcattctaagcgtcattcggcagattattgagccgaagctgctcgccaaaatgacgcgcaccccgcccgctgtgatgcttttcgctgtgtattgcagccttatcagccgcaatttttggctcatcccctacaccggcacttttttcatgctgatcggcatgttgaaaaaagccggaatactaacagtaaaatccaaatcaatataaattaaaaatcgcaaatttgcaaaaacaaaactccaaaataccattttaaaattattgtattttgatgaaaatccattcaaaaatcgaaagtgccgtcaaccatctgcttccgttttcataaagccttctaaaatgcgcaaaccctcctgcgtgttttgacccaagatttcctgtatcttcttgaaatcacgcgctttgtgcatgacgttttgcagcttgaaaaactcttccttgccgtgcttatgaatgaacagtgcctgcgcctttgcggcggctgtacgtcgtcaagcggcgcaagcgtgcaaaacgagacgagcttgtcgtcgtttgtcgacatcaaaacctatgttcggcgtcaaggcaattttgaaaagatgtccgcttttatgcaaaaaagcaagagaaggacggtctatccctctcttgctctgtattttgtatgaaaattttacgcgttcagcagcttttctgcagcggcaagcttgatggagcaacagaaaacttccatggcttgttcgagctcttcaagcggcgggaacgacggcgcaagacgaatgttactgtcgtgcggatctttgccgtacgggaacgtcgcaccggcatcggtcaggatgacgcctgcttctttgcatagctgcacgacgcgctttgcgcagccgtcaagcacatcgacgctgatgaaatagccgccgttcggcttattccactcggcgatgccgaggtcgccgatattttcctccaacatcagctcacacaggcggaacttcggctccaaaatggcgcggtggcccttcatgagggcgcgcacaccgttgatgtcgtgcagaaacaacacgtggcgcagctgattcagcttatccgggccgatggtagacgtgagcgtgtgctccttgaaatcgcggatattgttatcgctcgtggcgaggccggccacaccggcgcccgggaacgagatcttggacgtagaggcaaaaatgaagatctgatcttccgtgccgttttcaacgcagagatcgtagatattgagcagcgtatccggcgtatcggtgagatcatgcacacaataggcgttatcccacatgattttgaagtcctttgcagccggttttaatgcggcgaaacggcggacggtctcatcggaatacgtgacacccgtggggttcgaatacttcggcacacaccaaatgcccttaatggagtcatcgtccttgacgagcttttcgatgagatccatatccgggccggtagcatacatcgggatgttaatgagctcgaagccgtaatactccgttacggcaaaatggcggtcgtagcccggcaccggacagagaaattttttcttatccagcttgcaccacggcgtgcagccgttgtaaccgtgcgagaagccgcgggaaataacctcaaacatcatcatcaagcttgagttgttgccgagaatgacctgcgaagccggtacgccgaccatatcggcgaaaatgcgtttcatctccggcaaaccgtcccaaaggccgtagttacggcagtcatcaccgttggaattcgcaaattcgcttctcgctttcagtgcttccaaaacgccgagggcgagttccagttgttttgcgctgggcttgccgcgcgccatgttcagcgcaagatttttggcctgatagcccttatattctgcggaaagctcatcgaaaaccttctgtaattctgctttgctcaagtttgcgtacgccacgaaaacatctccataaataagattttgaattgaaaaataagcattcaattcatttttacgctccaatagcgcctgaaacaattcttattgtaatacaaataagctaaaaatgcaagccttatttataaatcttgcattttcctcgttttgcacgattgtacgacgtgttttcctgcttttccgttcattctgacaagcgtataacaaagcaaaaaccggcacagcgaactgcaccggcaaaagacttgcttttatgaaatttagaactccgcagagcccgttgtgcgcgggaacggcagtacgtcgcggatattggagatgcccgtaaggtacatgaccatgcgctcgaagccgagaccgaagcctgcatgcttgttgccgccgaaacggcgaaggtcgaggtaccaccagtaatcctcctcgttaaggccgagctcgcgaatgcggttcagaagcacgtcgtagcgctcttctctttggcttgcgccgcacagctcgccgatgcccggcacgagcagatcggtcgccgcaacggtcttgtcatcgtcattgaggcgcatgtagaacgccttgatctccttcgggtaatcggtgacgaacaccggcttgccgaactctttttcggtgaggtagcgctcgtgctcggtctggaggtcgcagccccaggagaccttatattcaaagttgtcgttgttcttttcaaggagctttacggcatccgtataggaaatgcggacgaaatcggagtttgccacgtgctccagacgctctttgagacccttatcgacaaactggttgaagaagtcgatgtcctgcgggcagcgcgccataacgtctttgatgatgtacttaatcatggcctccatgagatccatgtcatcgttgagatcggcaaacgcaatctccggctcgaccatccagaactctgccgcgtgacgctgcgtgtaggagcgctctgcgcggaacgtggggccgaacgtatagaccttaccgaacgccatggccatgcactccgcctcaagctggccggaaacggtgagggatgtctgcttgccgaagaaatccttgctgtaatcgaccgtgccgtcctcgtttttcgggacattgtcgaggtcgagcgttgtcagctggaacatctcgcccgcgccctcgcagtcactgcccgtgacaatcggcgtatgcacgtaggtgaagccgttctcgttgaagaacttatggatggcgaacgccgcagcggaacgcacgcggaacgccgcgttgaaaaggttcgttctcgggcgcaggtgcgcgactgtacgcaggtattccaccgtgtggcgcttcttctgaagtgggtattccggcgaggatgcaccctcaacggtgatctcctccgcctgaatttcaaaaggctgcttcgcttccggcgtgagcagcagcgtaccggtgacacgcagcgcagcgccgacattctgggaagcgatctccttgtaattttcgagtttttccgccgtaaagacgatctgtacgcccttaaagcagctgccgtcattcagatcgataaatccgagcgctttggagtcgcggatcgatctcgcccagccacagaccgtgacctgcgtatcgccaaaggtctccggcgatccgtagagggccgcgatttctgttcttttcatgatgaccacattcctttccgtgcggcacttaaactgcacacgcaaaacctacgctttggcatgcggcatttctccgcaaataatcacttttattatcatactacaaacgctatcggtttagcaaggaaaattttgaattttctccctgaaaacgcgatttatgcgcgatctttcttcaaaatcgcataatttgcgatgtcgcacagtcccccattgttctttgcaccctcgcgcatgatgccctcaaactgcatgccgcacttttccatcacgccgccggagtgcgggttattcacatcgtggcgcgccgcgatgcggttgaggccgacctcgtcaaacaagaaattaatcacggcgccgagtgcttcgctcgtatagcccttgtgccaccagttttggccgatgcagtagccgatctctgctgctttgatctcatcatccgtttttaccgcagcgatggtgccgataagcgcgttttcatcctttacaacaatgccccactggtaatagttaagttccccatagtgagacgcccactgtgcgatgatctgctttgtcacctctacgctgctgtgcgtgggccacgtgaggaactttgtgaccccagggtcggacgcccagttgcggtacatcggctctgcgtccgcaagcgttaagcggcgcaaaatgagccttggcgtttcgagtgtgacagtccccttgtgttccattgtgtttcctcctgatttctcctaaaaataaaacagtgcagaccgttcattcagcctgcactgttcattgcgatttatgcggttaggttctttctaactctcaaaaagcgtatgacaatgtaagcccgcagcacgtaccgttacccatggcatttgcggactgcatattcatcataacgcggacaaagcggaacattgtcatacccctttctttcaaatttgttttgactatcctaccacagttctttcggttttgcaagaggaaaattctattttcctgaaattttccggaaaatcagcccaaaggcgcgtgtttgagcagtccgcagtccttttcgccgtaaaagcgcaccgcgttgatacgaatgttcacctcatcgctcgggtcctgcctctgtgctttatcgtgcagtaaagcgcgcgaatacgcaaaaaaagaacgaccgcagccgttctcccgatgctaaaagtaaaagggacagaaagcttgcactctctgtccccttctattcaagattgcgactaaacctataagccgagttctgtcttggacaaccatctttctcgtctgcacgttgccgtgcagctcaagccatctcctcgaaaccgccgggccgacgtatatgtttctccacgatgttgctccgaatagggtttacatggccgcgcagtctcctgcgcgccggtgcgctcttaccgcacctttccacccttacctgcaatgcaggcggtatatctctgttgcactttccctggggtcgcccccggcggccgttagccgttattctcgccctgtggagctcggactttcctcagatgcggcctttcggcgtacacccgcagctgtccggcttactcgcaaaatttgtgaaatgattggattttaatactggttttcggaaagcaagcgattcttctcgtcccacagcttctgggaaaggtccacatagtagctgtgcgggttttcaaatcgcgttacttcttcccacagcgtatcgacctgcgcgaggcaatgcgcgcggatggcgcttaaggcacgcggctgatacaggcactcgccgtttttaaacagctgggtgcgcaggcgcacggcgcggaaattctccacagtcttgcgcttccacgtgtggttcgggtcgaagatcgtatacggcttctcgtcgtcgatgatctcgtcgttcagcgtgatgacatccgcaatggccttgtcggtctcgcggtcaaaaatacgccaaacctctttgaagcacggtgtggtgatctttgctacgttttcgctgatcttgatcttcggaacgatggtgccgtccggtttttcaacagccgccagcttataaacgccgccgaacaccggctcgctggaggacgtgatgagacgctcgcctacgccgaaggaatcgacctttgcgccctgcatgagcatatcgcggatgatgtactcatcaagggaattggatgcgcagatcttgcagtcttcaaagccggcgtcatcgagcatctttctcgcttttctggaaagatacgtgatgtcgccgctgtcaatgcggatgccggccgggcggaagccctgcggcacgagtacttcgttaaagacgcggatggcgttcggcacaccggatttcaatacgttgtatgtatcgacgagcagcgtgcagttgtgcggatattcttcggcatacgctttaaacgcttcgtattcgctgtcaaaaagctgtacccagctgtgcgccatggtgccgagcgccggaacgccgaaacgacggtcgctgatggtgcaggcagtgccgacgcagccgccgatatatgcggcacgcgcgccataaatggcgccgtcaaagccctgtgcacggcgggagccgaactccatgaccgatctgccgtccgcagcacgcacgatgcggtttgtcttcgttgcgatgaggctctggtggttgatggacagcaaaaccatggtctccacaaactgtgcctgaatgaccgggccgcgcacggtgacgatcggctcacccgggaagatcggcgtgccctccggcacagcccaaacatcgcaggtaaacttgaagttcttcagataatcgaggaactcttcgcgaaaaatgtgcttggagcgcaggtaatcgatatcctcctgcgtgaaagaaagctcactcaagtaattgacgagctgctccacgcctgccataatggcaaatccgccgccgtccggcactttgcggaaaaacatatcaaagtagccgatggtatccttaaaaccgttggtaaaatagccgtttgccatggtgatctcatagaaatccgtcagcatggtcaggttaatatgatcgttagagagattctgtgccataattcagccaccgctttctgaaccgaaagcattcctttctccgggagtgaggtgtgtcctcatacgccttattttttaccacacacagccaaaagcagcgctttaagccgatttgtattattataccgcaattttttaaaaagtacaatgaaaactcacggcaaaccgaaaaaatctgcatctgcacggaaaacggcgcgcctttgcaaaatgttttgttaaaagtttagtaccacgtacagtttacgccttttttcggaacagaacaaaatccggcctgcaagcacagcagaccggatctcatttcggttaattattcggcttccggtccgacatcggtcacggagatggcgtcgaggattgtcttctccatcgcctgcttgccgtacttatcgacatctgccttgttcttttcgccgtgggtcaggcagcctgcgccgccgatgcagccgccggtgcacgccatgccctcaatgaagttgttcggcagaacattcttggaggcacgcagcaaagccgccttgcaggcttcgatgccgtcgcatgcgatggcgttgagcttgaagtcttcgttgttctgctccttgagcgcttccacaaccgcgtcggacagaccgccgctgcgcgcaaagatgcggccgtagtaggaggcgttgtcaagcacgccttcttcgagcgtggtgaggtcgatgttgcggctgtcaaacagtgcctgcagctcctcaaacgtcagcgtgcagtcaatgtaccggcttgccggctcgccttccttgaactccatcttcttcgcagtgcacggcccgatgaaaacaacctttgcgcccggagtggtctccttgatgtagcggctgatctcagctgccggagacaagttgtgcgagattttatcaaccatggtcgggaagttcttcttgatgtaggaaacgaatgccgggcagcaggagcttgtgaggaagcccttttccgcaagctctgccgcttccttatacgcaaccatatctgcgccgagcgccgcttcgatgacatgatagaagccgaggcgctggatgccggtgatgacctggccgagctttgcatagctgaactgactggaaatggacggtgctacgaccgcgtaaaccttgtagtcctgattctcgtggctgcccttgatgaggttgacagcatcgagaatgaaggacttatcgacgattgcgccgaacgggcactggtaaacacatgcaccgcaggagatgcacttttcgttatcgatatgcgctgcgcgatgttcttcgctgctcatgctgatggccttaatcttgcaggccttttcgcacggacgcttctggttgatgatggcgctgtacgggcatacctttgcgcactggccgcactctacgcatttcgacttatcgatgtgtgccttctgctgctcatcaaacgtgatggcgccgcggcggcatacgtcctcgcagcggtgtgcaagacaaccgcggcaggactctgtgacgacatggccgctgaccgggcactcgtcgcaggcaatctcgatgacttcgatgacgttcgggtttttcttgtcgccgcccatagcgagcttgatgcgctcctcaacgatggcgcgctctttgtagatgcagcagcgcatcgtcggcttttctttgacgatcagcttcggaatctcatagtatgcggcgtcgaggttatcctcaaaaccgtaacgtgcgacctcacgcaggaccttatacttcaaatactggattttcgtatcaaactttctcattcttcacatcaaacctttcttgctttggacagagatttccttttctatatttttcaaatcttccttagagtgccgtgacactctatacacagaagcttttctgcgcttagaagtaggataccttaacttttttgcccatcttctcgagcgaggtgcagagattttcgaccaactgcatcttaatgttgaagttaatgggcagattcgggttctggtgcgccgggtttaccgcacgaccgacaaagaagttgatatcggtcgcttcttcaaacagcatgcgggcgatcatggacgcgccgtcgcgcttatagccccactggctgtacttgcggttttcctcaaggtaatccttcgcgtactcgacgaccttgctcatggtgatgacgccttcggtgacaaggtcgagtccttcgaccttcgccgtgggcggaatatcggaatcgaggtaatcgagctgtgcgatgatgggctttttgaggtattccgccgcaagcgtagacgtggtaccgccgcagacaatccgcttgccgggtgccgagaagaacgcctcgtgcattttcgcgagatcttcgggtttagacggcggtccgatcatcaggttcacgcagcagcgctcgcgcactttgacgcagaccgcggtggtatcgtcgcccggctggccgccgtagagcttgttgcactcatcgagcagcagcgcattgagcgtttttgccgtgaagctttcgtcgtacatcatctccatatagtcgatgatgtccttgcgctcccagccgaaattcagcgacatgccgatgccggcatgaatggcgccgtcgctgaacgcgatgaacgtgtcatccttctgaatcgggatgcgggtcttatagatcgttttgccgccgatctcgacggcttcgcgcgggtattcccagtttttgccgttgcgcagcagaaccacgaacgggttatcatactgaatgatctccgcttcttcattttctatgattcggatgatggtgaacgtggaatacgccacgccgcgcaccgcgcagatgggcagtgtagacgcaatggtctccacgcagtcttcgacatgcagcccctccgccatcatggtagagatgatctttgcggtcagcgtggaaagaatatttgccttaacaccgctgcccatgccgtctgccagcacaaccaccgtggaattttctccctgcggaacgatgtcaacgtgatcgccgcaaagctgttcaccttttttgttgaggctcatccagccaatatcagtacagagattattcatcttgcagcgattcctttaacttggtgagcgcgattttcgtttctgccgtggtctcgccgagcagcgatgcgatctcctgtacgacgcgcatctgcttttcgatcacacggttggtgacttcaatcgtctgctgccccattttttcttttttcaggtgttcgttcatttcatccgtcacatcacgcatgatgcacatgataatgtgatagttgcggtcgtagagcacggtctggtcgacatacttgccgtattccgcaaggtacacacgctcgtcgcgcacgccgcggccagactgcatgacgtcgatgaagacgcgcgggtccagaatgcggatgacctgcttgccgagcacctcggatgtatgcttcacgttcacgatcttacgcgcggcagcgttgatctgctggatttccagcgattcgttcagcaccaaaatgccgttcggcgtgttgttgatgatggtatcggagaacgactgcgctttgccgagcagatacggcaggcacatggaaatctccgccttgccctgataaacggcgatggccttttcgcggcaggtattatagccgcaggcaccgcagttcaattcctgctccgggcgagtcttgcccatctttttgaggatagcctcaatctcgatgttgcccggcatgaggtgatacaggctgatataatcaaaatcgtgcttgagctcttcggaagccggctgcggcaccgcaaagtcctttttgccggcatacttgttgaccgcgataaaatcctgcacaggctgacgctgaccctgatccatagccgggccgttgatgcagctgccgaagcaggcgctcatctcgacaaagcagttctccattttgccgctcttgatgtcttcaagcgcgttgatgcagttttccacgccgtcgatcgccatgtatgtatactcggggtcatcgcacaccatggtgcgcagaatgcctccggtcgtcgggaacaggcgcgcacggctttcttccgtgtgatcctcgcctgcttccacggtgatgccctctttttcaaaccaagcggaaagctcctcgaacgtgagcacacagtccacatacgggctttcgtcggcctctgcctttttggagatgcacggcccgatgaaaacggtcttcagttccgggtcttcctccttcagcatcttacagtgcgcctgcatcggcgacaaaacatgtgcaaggtacggcagagcctccgggtaatacttctgcacaagcgtattgacagagtggcagcatgtggaaatgatgacgctctgccgacgctctttaatgattttttcgtattcggtcttgacgacggacgcacctacggcggtctcctctacccggtcaaagccaagttttttgagcgccgcacgcatcgtttcgatggtagcgcccgggtaatttgctacaaaggatggcgcaaggctgactgccacgggacattcacccttgacgaacatctcagcaatcggtacgtcatttcggatttcttttgcgttctgcggacatacgacaaagcactggccgcagagaatgcactcgtcttttacgatatgcgcctgactggactgaaaacgaatggacttgacagggcaatgacggatgcacttataacagttctgacagttagactttttgagcttcaggtagtctggcataccctattatcctctctttaacttatcctcttttggcgttcgctttcgctacgaacttttcatccttgacgatgaatctttcatgggtaccgctgccgatggggccgacctcgtcaaacgccttaaccgtgaacaccaaacggcggttgtccacttcggtaagttcgcactctgccgtaacatgcatgctaagcggcgttgcggacgtgtgctgcacattcatcagcgtgcccacagtgcccatgcccggctctaattccggcgcaacgcacttccaagccgcctcttccatcagcgcgaccatagcgggcgttgcaaaaacgtccagcgtgccgcttcccatggctttggctgtgttcttctctgtaacaacggtctcggctttgcctttcattccggctgtcaacaacttaatcacccttacttcctattttctgctgcgttttgccgcacacagcagcttacacacggagagccgatgcaaaaaggctcttgcaccggctaaatttttgtttcttatgcttactgaacctttgcaagaatctctttctggaagaattcctcggtggtatcgggagatacggaatgcttctcgccgtctacggtgacgttgacgccgtttacgcagtcacccatgcagaaagtgccaccgagttctaccttatcttcgaggtggttttcctttacgagcgcctgaagcttttccacgacctggcgggaacctttcagatgacatgagctgccgatgcagatgataactttcattctaatcaaactccgtttcttagtttttggtttttacttatttgtttatataatggcatagaaaagggatcttccttttctgccaagctaacttaggtattggcgtcaaatttctccttgagctgcttagataagagcgcaagcgacgcggcgaggttttcgttatgtaccaatatgccctccggcacatcaagatgcacgggcgcgaaattccagatagccaaaattccgctttcaatgagcaagttgcagatggcctgcgcattttctgccgggaccgcgatgatgccgatgcgcacgcgcatgcgctcacacagatccatcagcttatccattgtcagaatgcgtttgccgctgtaatcttcctcacatacctcttcatcgatatcgaacgcggccacaatgttcatgccgcagtctttaaagccgccatacgtcagaagcgccttgccgagcttgcccgcgccgacgatgatggcgtcatcaacatcattgtagcctaagaattcctcaagctctgcgatgagcgcctctgtgttgtaaccaaccttcggcttgccggccgaactgaccgctgcaaggtctttgcgcacaacgacatggttgaggcgcagcgcctctgcgatggtcgtggcggaaatgtgttccggcgtgttttcgccgagctgcttcatataattcaggtaaagcggtaacctgagcagcgtttgttttgaaatgctgcgattcaccatgacgcagccaacccccatccaaacagaaaatcaaaataaaccaaacatctaatactttaacacaagaaacgaccaaatggaatacccattttcaaatatcgatataatttcatcgatataaaagcaaaaaagccccaacgacacgttaaaaaacagacaaactaaatcaaatacaaacttcggcggatttctactccgcatgtggcgtgccgaactttgcgctcaataaatcgcgctcctcatacaacttttcgatgaactgtttatcgaccgccgtatatttatattcctttttggacgtcaaaatatctctatacacgcggtgtttgttgccgcggcacggttttaacacaagctcatagcgttcaagctgttccacatccgtcggcgagacccacatatatgtgtgcggcaccgtcgccaaaaggtcgagctgactgccgcggctgtaaacatacacgcgtttggtaacgttttcgtccatctctgcctttttgatgtcggacatcggcagcgacggcacgaacggatcgccgtggcaaatttcgatatagccggaaaggtcttcgatatccacaacatccttttgcgagagcgggtcgtttttggagatgagaagctgatactcgaattcccagatgttctccgacttcatgcccttatcgcgcagcatgttcgtaaaaaagctctcaaagatcgtctgataccgcacgatggcaaggccgtagttttcctgtaccacgttgcgaatggcacgcatggcgttcgtttctttgaaactaaactcgatttcctttgacatatccgcctcacggacaaacttggaaaacgcatccgcaatatagctggcgcgcggcaccgagatgctgaacttcagcttattattcttttcgggcttataaagcgactccatttcttcgatctgtgccagaatactcttggcgtagccgagaaactcctctccctgcggtgtgggcacaatgccctttgaggtgcgcttaaagatcttgacgccgagcgtctcctcaagctccttaatcccgcggctgaggttcggctgccccataaaaaggttttcggcagccttagtgatggatgcggtcttctctacttccaccgcatatttcagatgtgcgatgttcattgcgttctcctacggacatatttgaaagggcataacactatttcgattatattataacatatcccgctctcttgtcaaatacttgtgcacaaaaacagcgtaaaatccgaaaaaatcggcggctaaaccgcattttcgtccgaaagcaggggtgcaatgcgcttttcggcttcgagtactgcacgggtaatctgctccgtcatctcggcgcgtatggtacacaccgccgcaagggtatcggcatccggagtgttttgccgtgcggtgacagcaactaaaagttcgtctaagaacgcgtccacctcggcggcatcgtaggtgttgccgcgcttaactgtaaagcgaacagcctttatatattcaggtgtcagctccattttcggcctcctcccccggctttctgccgtactttggctgatatagttttttcggcagaacgcgcgagaatgcataggaaagcgccgcgccccctgcaaatataggcagcagaacgggccaatcacccgcgacaaaacccatatgcggcaggcagaatgcgctcactttgccctctaaatattcatacggcacttcggcataggctttgaattcccccgccgtatgccaaacgcgggcttcagggtcgttttcggtcagcgtcagcagcaatagaccgcgttcggtttgaatcgccgcacagtcacccgggaaataatcttcggcaggcatatatgcgtaatatgcaagcgaattcacgggataacctgtacagtcggtttgctttacagcaaatgcgcactgtccgaacagaatcggcgaaaacaaaagcagaatgcaaattgtcgcgagcgcactgacaagtgatacagctttacatactttgattgtaaggctatttatctttacaggattaacattcatgattcatgcggccgaccgagcatctcctcggccattttgagttttaacggcgtgatgtcatcgccgccgataatacgggcaatctcgcggacgcgcgcgtctttcgtcagcgtgtgcaccgctgtgtacgttttgttgttctcctgctttttgacgataaacaggtggttatccgccatggcggcgatctgcgccaggtgcgtgacgcagatgacctgcgcgttttgggagacgcagcgcagcttgataccaaccttattcgccgcttcgccgctgataccggtgtcaatctcatcgaaaatctgcgtttcggccgcgccggaatcctcagacagcacggtgttgatggcgagcataatacgcgaaagctctccgccggacgcgatcttcgacataagcttcggatcctcacctgcgtttgcggagacgaggaactggatgcggtcgcagccgaaggctgtcaacggtgtgcgctcctgctccacggtgaagacgacgccaggcatgttgagctctgaaagctcctgccgcacgcggcgcgaaaaactctcgcacgcagcgcggcgcttcgcggatagctgctttgcaagcgtcaccgcttcttttttcttctgctcatactgctgcaaaagcaattcttttttttcatcggaaaactcgatgtccgaaagctccgcacgggcacggtcgaggaacgaaagcatttcttcctctgtttcgccgtatttgaggctcaagcggtagatgatttccagacgactttcaatctcatcaagctcgtttgcgtcgaacatggcgttatcgaggtaatcggagatttccgccgcggcatctgtcagtgcgtattcggcgtcgcggacatgctcggcgacgtttgaaagcgacggtgcatagcgcgccgcctgctcgagcgactctgccgcaacggacacggccgtgatggcgccgccattgtcctcatcgccctgcaaaagcgtgacagcttcgcccacaccgcgcacgatacgctcactgttgcggatctcatcgcggcgctcggtcagctctgcctgttcgccgacgcgcagctgtgcagcttctaattcttcgatctgatagcgcaaaatatccatacggcgggacttctgcccctcgtcggattcgagcgcatcgagctcgcctttgatgcggcgcagcgccgtatacgccgcgcggtactccgcaagcagaccgtatgcgcccgcaaagctgtcgatatacgtgccgtgcacttccggtgaaagcaacttgtagctttcatgctggccgagaatatcgatgagcgtgccgccgacggcgcgcagcatggaaacggtcgccgggatgttgttgagcttgcaggaggagcgcccgtgcgggcgaatctcgcggcgaataagcaaactgccatcgtcttcaagcggaatatccagctcacgcaaaacctgctgcgtctgcggagaaacatccgtaaaaagtgccgaaacactcgcctgctccgcacctgtgcgcacaagctcctttgaggtacgctcaccgagtacggcgtagatcgcgtcgatgatgatggatttgcccgcgccggtctcgccggtcaaaacggtgaagcccggttcaaaatcgatagacgcctgctcgatgacggcgatattctgaatgtaaagctgcgtcagcatatcagaccccgccaatcagttttctgagctcgttttgcttttcctccgcaatctcatccgttttacagatgatgagaatggtgtcttcaccggccagcgtgccgatgaaatccggaaaatgcagcgtatccatagaggcgcagaccgcctgcgccatgccggtcatgcacttgacaacgatcatgttgccggccgcctccacgctcataaccgaatcgccgaacagcgaatagaacttggaggaaatgtcgcgggcattgtcgcgcccggtggaatatttatactttccgttcggggaaagactctttacgagccgaagctctttgatatcgcgggaaacggttgcctgggtcacgtcgaagccacaagcgcgcagattgcgcaggagctcctcctgcgtgtcgatatcctgtgctttgatgagctccagaattttggcgtggcgtcttgttttcatgctttctgccttccttcctgccttttaatttctgctttgcataaatttgctgtctacaatatcgtaaaaattgcgttcgtcggtctgaataagctccgtgtaataggtcgagcggctgacggaaaccgtgtccgtcttatgaatacgtatgggtgcgccaccgtctatggtgagatacacctcgccggaataatcgctgtccgtgctgaccgtgatggtcttatctgcgcagaacagcgtgctgcggttaaagagcgcatgcgggcagatgggcgtgaagattacgcattccgattccgggtcaaccaccgggccgcccgccgagagcgagtatgccgtggagcccgccggtgtagccaaaatgaggccgtccgcgcggaatttataaagcttggaaccgtcgacggaaaagccgaaatcgtaaattctggactgcgcaccggagacgaccgcgtcgtttaaagcgcggtaggttgtatcccccttcacgctgtgcacggtaacggaaagcatcatcagacggcgcacacggtaatcgcccgtaaagagcgcctttaatttgtgcagctcgtccttctccacacctgccaaaaagcccagccgcccaaggttcactccaaggatgggcttacctgcaacggacgcgtgctttgccgtgtggatgatggtgccgtcgccgccgaccgcaacgataaggtcgcagctttccgccagtgcggcgtgatttttgcagaacgtgacgtgttcatactgcccgcggtgcttttcgtgcatgagtgtttccgcaccgttttcccgcaaaaccgccagaatttcccgggtgtatgtgtccgcatcgcgtttatccagatttggaatcaccgcaattctcataagcctcagtcctttttgtccagcgccgcgtgagatgcttccacgatctcgtgcggcgtactttctgccgtattcaccggcgcgtcgcttttttggaggaacacaagatactcgatgttgccctccggtcctttgaccggcgagaatgtaagtccctgtacggaatatccgttttccactgcaaaatcgcagatcatctgcaccacttcctcgtgcacggctttgtcgcgcacaacgccctttttgcctactttttccctgccggcttcaaactgcggcttaataaggcacacggctttgccgccgtcctttaaaagcggacgcacggcgggcaaaatgatcttgagcgagatgaacgacacgtctacggagaagaagtcaatctcctccggaatttgctcgcgtgtgagatagcgggcgttcgtacgctccagattcaccacgcgcgggtcggtgcgcagctgccaggcgagctgcccgtagccgacgtctacgctgtatactttggaggcgccgttttgcagcatgcagtccgtaaagccgcccgtagatgcgccgatgtccatacatacggtgttttcgagcttgatcggaaacagctgcatagctttttcaagctttaagccgccgcggctgacgtagcgcagcgtgttgccgcgcacctctaagactgcgtcttcacgcacggtgtcaccgggcttatcgaatttctggttatccgcgtaaacacagcccgccatgatgagcgtgcgcgctttttcgcggctgggcgcaagccctttttcgtaaagcaggacgtctatcctttttttcatatagaaactgcctttccatctttcttttctgcgatttgcagcgccgtgtgtacggcgttcaccatgccctctacgtcaagaccgagcttatgcagcgtgcggaacataggcgcgtgcttgatgaatccgttttcaatagcgtgcacttcgtagtgtcctctgaaattgcgatccaacagcatggcgccgaattcctccgcgatgccgccttggcggacgccctcttcaaagaacagcaccgtgggacaccttaagaccgcttccaccgctttcggatcgatcggcacgatgcgattgagcttcacgatgcggcactttatgccctctttttcgagcgtttccgccgcttcgcacgcaaacgagaacatacggccgtaggtcacaagcgtgacagaagcatcttccgtgccgaacacacaaaacggcttgccggaaagcgtgtagttttccgggcgatacagctctttgccgcgcgggtagcgaatcgcataaaggtggttttctcccttaatacagtcatcaagattatccgaaagctcatcgtaatacgtcggcgcgtacacatggatgtccggcacggtgcgcaggaacgcggcatcgaacacgccttgatgcgtctggccgtcttcgccgaccacgccggctctgtccacggccagaataattttgagatgctgcaaggcgccgtcgtggatgagctggtcgtacgcgcgctgtaaaaacgtggaatacaccgcaaaaaccggaatcatgccgccgcgcgccagaccggcgcagaacgtgacggcgtgttcctccgcaatgccgacatcaaagaaacggctgcggtatttttcgcggaaacccgtcagaccggtgccggattccatcgccgccgtaacggcgcacagcttctcatttgcaccggctatcgtgcacatcgtctcgccgaacgcatgcgaaaaacccttggcaatggcttcgcccgcgcccttttcgcggtcaaacgccgcaaggccgtggtaaacgctcggagcgttctccgcgtatttatatccgcgtcctttataggtgcggatgtggatgagcaccggcttatccatatcgcgcgccatcgtcaaaaccgacgtcaaggtgcgcaggtcgtgtccgtcgaacgggccgtaataattaaagccaagatcctgaaagatcgtggtgttgaaaatattctttttgatttggtttttcacgcggcgcacttcggcagccatgtgctcgcccaccttcggcacgcggcacagtgcggcttcgacgctgtcttttgcgttcaaataccccggctttgcgcgcacgtaggaaagataacgcgcaatggagcccacgttgcgggaaatggacatggcgttgtcattcaaaatgacgatcatattgcggttgatgcggcccgcattgttgaggccctcatacgcaaggccgccggtcaacgcgccgtcgccgatgacggcgatgacatggccggggtcacccgcaagtgcctttgcaacggaaagaccgagcgccgaagaaatggacgcgctgctgtgccccgttgtaaacgggtcgcagtcgctttcttctctcgacggaaagcccgaaagcccgtcctcgcggcgcagcgtggaaaacgcttcttctctgccggttaaaagcttgtgcgcgtaggactggtgccccacgtcccacacgatgcaatcctccggcaaggtgaacacacggtgcagcgccacagtgagctccaccacgcccaaattggaagcgagatggccgccgttgtccgccaccgtgctgatgatctcttccctgatctcatcgcaaagctccggcagctcgtttgccgcaagcttttttacatcgttcggggccttgattttactgagcaatctgctcatacttacaccagtccgttctgtatttttgctgccgttacggcgtttttcatcagcattgtgatggtcatggggcctacgccgccgggcaccggcgtaaggtagccggcaaccgcctcggcgctttcgtaatcgacatcaccgcacagcttgccgttttcatcgcggttcatgccgacatcaatcaccacggcaccgggctttaccatatcgccggtgacaaatttcgccttgccgactgcgacaacgagaatatccgccattttgcagatctctttcaaatttttcgtgtgactgtggcagatcgtcaccgtgccgttttcatgcagaagcagcatagccatcggcttgccgacgatgttgctgcggccgatgacgacgcagtttttgccgtcgattgtgacgccggtagagcggatgagctcgatgatgcccgcgggcgtacacggcaaaaatgcaaaatcgccgatcatgatgcggccgacgttttcggcgtggaacgcgtccacgtcctttttcgggtcgatatgctccacgatgagcgcttcgttcaagtgcttcggcagcggagactgcaccaaaatgccgttgatcttcgggtctgcgttcagcttttcgataagcgccaaaagctcctcctgcgtggtgttttccggcaggacgtgttcctcggagtaaatgccggtctcggcgcaggccttgcctttgttgcgcacgtagattttagacgcggggtcttcgccgacaagcacgaccgccatgccggtctgaacgccctgcttttttaaagcggcaacttcttcggcaatttcgccgcgtacctttgccgcaacggccttgccgtcaattctcactgccatcgttcttctcctcgctttccccttctgccgtttcattcgcttcttcggcttcatcagacggctcttcggaagtgtttgcatccgcatttccttccgctttttcattttccgcctcggcagctttctttacgccggtgccgaccgtcatatgctcctgtgcttcttcggcgctcatgccggagaaaatggtgctttcggcagtgtcgtcaatctcgaccttctccgccttgtcttcaactgtcaggccggcagcttccatcgccttgcggctgccgcagcccgtaagcttatggcagttgcggaacacgatgagcaaaacaacagcgacgagtgcagaagccgcagcaagcacctgcgaaacgcgcagatcgatacccggcaacagcagactgtctgtgcgcagaccttcaatgaagaagcgcgtcacgccgtaccagatgatatataataagaacgtctggccgtcataccggcgcaggtggcgcgtgaatagatgcagtaaaacaaagcctaaaaggcacaaaatcgattcataaaggaagcacgggtgcacattgcctaccacttctgcggcggtgcggtcactgtacatgccccacggcaggtcggtcgcgcagccgaaagcttcttggttcacaaaattaccccagcggccgacaccctgaccgatgagatagccaagagacgcgacatccagcacggcgaacaggttcatcttgcggatcttcgcgacgatgccgccgcacagcaggccgccgatgatgccgccgtaaatgccgaggccgccctctttgatgttgaaaatctccatcgggttcgtgatgtacttgtcgcccgggtagaagatgacgtagtaaagacgcgcgccgatgatgccgccgagcaacccggcgatgatggcatcgagcaagtggtctttattgatattcatttttttgcaggaggaaaaaccgtacagcaccgccagcaggaaaccgatgccgatgatgatgccataccagtaaatggtgaaattaccgacctgaaacgcgatgggattgacctccaccgaaattccgaggtttggaaactgaacttgatgcgtcatgactgtatatcctttcgattaagcttcgtccaacggacgaatgatggaagccgccgttttgtccatatcaaacagcgtctgaatgcgcgcgttcacgtcttccgcggtgatctcggagaagcactcgatgtagcggaacagctcgcggtcgttaaagtgcatggtcatcacggcgttcgcgatgacatccgggctattgaggccggaaacatttgcgccgtaaagggatttcgcgctgcggcgcacgtcttcctccttgacaccttcgcgctttaaacgtgccatttcctcgcggatggcatcacacacggcctccgggttgccggattcgccgccgaacagcagcgcaccgtagcccgtgccctcaaaatactcgtagctgaaggaagcttcgttcacaaggcccgcatctaagagcttgcggaacatcggcgagctgtcggacgccataatatcgagcagcacctcggtgacggcaaggtctttttccgtgcggtgcgcaccggttacggcctctttcacgccgaactggaacatagggcacgccacaggcagcttctcttcgacgagcggctgcacgatggtatcaggctcctcttcaaaaacgcgttccacctcaacgggctcgctctttttcagcattttgtcgcacagcgcgaggacttccgcctccgtgcagttgccgcagacgcacagtgccatgttgttgaggttatagaacgtgttgtagcagcggtaaaggtactccggggtgatttccgcaatgctctccaccgtgcccgcaatgtcgtccttgatcgggtgcgtgtggtacatggcgcgcagcaggctgaacatcatgcgccactgcgggtcatcgtcatacattttgatctcctggccgatgatgccgagctctttttcaacggtctgctttgtaaaatacggggactgcacgaagtcgagcaaaatctccagcgcctgctctgcgttttccgtgcaggagaacaggtagcgcgtcgtctcaaacgacgtatatgcgtttgcggaagcgccgatctcggcatagcggccgaatgcgtcgccgtcttcgctttcaaaaagcttgtgctccaaaaaatgcgcgatgcccgcgggtgtcgtctctgccttatcctcgtcgctgcgtttaaagaccttatcgatggagccgtagcgcgttccaaacaccgcatacgtactgcgcatttccgctttcgggtatataaacacggtcaggccgcttgcgtgtttgacgcaacggtagccgtcccgaagaagtttgctttccacaagggtattcttcatttctgcgctcattttgccgctcctttcagcttatagaccgtatcgagcgtgacacgctcggcggcgctgacgatctcgtccttcgtgatgttcatgatgcgctccgcatattcctccggcgtgtggagcttgccctgcagcataccgctgaggtaccatgtctccatggatgccgcggaatctgccacggcgttgtagctgttgcacatggcgagctttgcaaagagaatctcatcgtccgtgatattgccctttttcatatcgttgagctcttttaaaatcgcttcttccgtgcggtcgaggtctttggtctccacgccgctctgcacgaacatgacgttcttcggcgtatcgtggcgtgcggcgcagtagtagcaaaggctctgcttttcgcgcacgttcataaagagcttgctgctcggtgtgccgccgagcacaacggacatcagctttgccgcaaggcgctcttccggcgtggtgccgatggcaaagcccatgacgagcttagactgcacaacgggcatttcttccgtcacacgctttacgtctcccgatgctgtgtggcgctttgtttcaatggacaccgcgtcgcgcatgccgaggcactttataagctgctgcgcaaagcggtcgtccgcaccgtctccgattgtgaactggcagatctgcgcgtgctttacggcatactcccacgccgctttcacgccctcgcgggtcgcattcaagatcgcctcgcgcgtaccgatgcgcggcacacctgcgggttcgcccgcaaacatggtctgcacacagcgctgcatggcatacgtcgccttatcgttatattccgcgtcaagcgtctccaaaagctggcgctgctcctgcaaaaaaccgtcctccgggaacagaccgttttcatcgcacagcggcgtgaacagaatgctctccagcatttcggaaagcgcctgctgcacatcttcgccgccgaacgcatacgggttcgcaatgccggccgcggcaagcgttaaaatctggttatcgcccacacgtgtgacacccggctgcaccgaagcgccgtacagctccgcaaggcgcttgccgaactgcgtgtaatcggggtattcgcgcgtcgcacgggagatcatattcgggacgagtgcatataaagccgcattttccggcgtggtaagcggcaacacaaggtgtgcggaaacgcgtgccgttttaaactgcggcgtgctgctccagaacgcctgcaagccgcagtccttctgttcaaaaaaatgattattcatctctgaaattttccttcctgaaatagtttaaaaccgaattttcaaaaggtatagttgcataaatatgctttcgtattcgtattatagcacagcttttttcaattttaaagccaaagacggctttttcacaaaaaattcagtttacgcgcgcacaaaaaaaccgggcgcaacacttttcgatgcacccggctgaagctgcggtctcactcgaccgtattcaaattgatctcgatgtccgtgaattcttcccccgaaacataatcaaaccgctttgtaataacgagatgctcttcatctttccaagtgagctgcatatcaaaagtatccgcccagccgccctcatacacgcgctttgacttaggtgcgaccgtaaagagcaataaattaagccctctgttctcatacacctccacaaacgtcgctccgccgagcgcaccttgatccacgttgatgatctccgcccgccgcgttccctccggcgatgaaacgctctgctcgactgttcttgccgaaaacagggaggcaaatccgataagcccgatcagcagcacgagcaaaaccgagatgatctcgaccagaattctaccgatcttcggcttgccgtacacaacggtgatcgacgcgctacacagcacgcagatcaaaagcgctatcgccgtccacgcgcttttctgcggatggagcgaagacgtacggaagaacgaagtgtacgcgagcgcgtcgagcaaagacaacggcatcaggaaaacacacagtacgccgtccgattcgtcctttttaaagagccgcagaaacagcacaacggcagatatgaccgccaaaagccacgcgtaaccgacatagctgaacggctcaagcgtgtaaccgattcgctgcaagccccattttccgcatggcaaaaccgcttccaatacgaccaatataaccgtcaaaccccgtattgcccgtttcattttccttctccttttgaaatccacctcaaccgaggtacattttttcaaacgcctctatgctgtcaaacacattcggtttgagccctgctttttcgtattcctttgcatataagctgagtgcaccgtcaaactgcgccgcagccgccgacaggtcttttgcatcgaacttttcaagcaggtcaaatgcgggaatgtcgaggttctctccgatctcgtcgagtatatactgcaaattcgccgtcgcgtcaaacacggaaaacacgtctttctctttcgccgcacggtgtattttgtgctgccagttgctcaccatctcttccagcgtgcccttgaggtcgtccggggtcggttccttcttctccgctttcagcgcatagactgcccacgcttctgcaaagcagtcatccgcagcacgcatcagcttttccgccgccgtgcgcaggtctttcgccgtgcccgcgcggatgacttcttccgttacggccttgaaatttcgcggcacgaaccgcatctgctcaagctccgtaaagcggtcgcgcacgcttaatttaaacacttgcttattcagcacgcagatcgtaccaaacaggcaattcagcaggcctgcggcatatttgcggctttgcgcgaacgctctttcgcgcatcagcttcgcaaataagcgctccgcttcgccgaacatcgcctccgcgcggcgcagatcgtcttccgtatacggcgctgtgaggatgctttgcgccttttcacgcaacgcctcaaaccgttccctgtccgcattttccgggcaatagacgattttggaatcgagcagctttgcaagatacggtgtggtgtaatttgcttcttcttcgagcccttcccatttcacgccgtaaaaatccatgccgatgccatcgagtataaaggttacacaggctttatagccgtcctcgttccgcattaaaacaaacaggtcaaggtcggacgtttccgagtatcgccccgtgcaaaacgagccgtacattgcaattagcgccacggcgcttttgcattctttttctgctttttgaatcacgtcccgaatcaatcggtcgttgcgctgcaccagcgcatttctgttttcttccgtcatgttagttctcctgtccttatcaaacaaaatcgtttcgggcgcaaaatgcgggacggacacattctgcaccgcttttcatacatcagccgcagcttcagtatatcaaaagcgatggcaaggcgcaatattttctcttaatttgtgaaatattttatataatttgtcaattctgttgtgcttctttaaacctttccagctccggcacggcgttcgccatttcggctttggcgttttcgcctgtcaggtggtctacggcgtacagcaccacgccgtctgcacccgcttcctttgcgcggtcgatctgctttgcgagcgtgtcggtcgtgttgagccatgtgccgttgtccgcatccgtgcccgccttgtacaccgcaagcccgatatacagtttgatgctcggcaggcgctttaatgcgcaccaattttggagcgccgtttcaaacggcagcgcttcattttcaaagctgtaataaagctgcgggcaaacgtaatcgatataccccgcctgcgcacaccacgtgtacacgtcagcgttaatcatctcgttgttttctaaattgccctgcggcgaaatgccgaactgcacgttttcattcgcttccttcacacggctgtacacggcggcgatgagcgcgttcacgttcgcggtgcgccactcgtgcagcgtgagcggctcttccgtttcttttacatacgccgcgtactgctcagcgtcgatgctttcgtcgtccgtggggtaaaaatagtcgtcaaaatggatgccgtccacgtcgtatttttcggcgatctccgctgcgccgtccgcaatgcggttgcggatatacgcgcttgcggggttataataaatgccgctatcgtacgccataaaatattccgggtgatttacataattttgcatataaaatccattttcgtcaagctccggcgggattgtcgtgctcgcaatgcgcagcgggttgatccacgcgtgaaactgcatattttgcttgtgcgcggcgtttaccatgtattccatcgggtcatagccggggtctttcccctgcatgcccgtcaaaaggtgcgaccacgactcgtactccgagggatacaggctgtccgcaaacggccgcacatgcacaaacaccgcatttgcgccgacgcttttcgcagccgcaagcttggcatcaaaattttccttgaacgcttcttcggtcttctccgtcacatcaagcgccatgtacggaatccacacgccgacaagcggttcttctgcttttgcggtcgtttctgcggcgttgctattctcctgctccggcgcagtgcttgagaatacaacttcaacggagttttccgccgcactcggctctgcgtttttctcccgtcccgccgcgcttttcatcgccagaaatacggccgcaaccaaaattaaaaccgcgatgacataatgatactttttaattacgatcatacgctttttcctttctctctgcgttcccttgaccgccaaacggatttgcggtaagataatcataagtatgagacaagcgaggaaaatatgatggattttaaactggaacccgtgcagttcacactgctgacctattattgtatcatcaatatcacagccgcagtcctgaccgttaccgataagcgccgcgcacagaaaaagcagtggcgtgtcccggagcgcacgctccttttgctcggtgcggcaggcggcgcactcggcgaatttatcgccatgctgtgtatccgccacaaaacaaaacacctgaaatttgtgatctgcatgcccgttttcatcgtactgcacatcgtccttttctatcgaatttttttactttgagggagactttaatgaacacaaaatatagaaatctgctgtttgatgccgatcagacgctcatcgattttgaaaaggacatgccgcttgcatttcaatatatgtacgagcaatcgggacttgcaaagcaaaagccatacagcgcagagattctgcgcctttataacgactgcaacgaaagctggtggcggcgttttgagcaaaagctctgcaccaaagcggagctgtaccgcaaccgcttcgtcgatttctttgaagtcgcggggctcacaccggtcagcatcgattttttgcaagacctgtatgtctccggcatagcgaaaaccggcacgccgctgccgggcgctttagatatgctacatgcgctttcagagcattacaacctctacatcaccacaaacggaaacccgatctcgcagcccggacgcctcaagaattccggcgtcacggcctttatgaagggctgctttatttccgatgagatcggcgcggcaaagccggataaaaaatattttgattatgtccttgcgcacataccgggcgcgagcaccgaaaactgtctcgtcatcggcgattcgctttcggcggacatcaaaggcgcgcagaacgccggtttagacagcttatggtataaccctaatcgcaaagcaaacacccttcccataccgcccaactttgaagccgcaagctaccaagatatcgtaagaattttgctgtaaggagcttttatggagaaccccgacatcgaccgcccggccgtgcacatcggcttcccctttttcgcggcgctgtttgtcgcctctttcttcggcgcgccgtttgccgccgtttcggcggttttgctgttcgccgccgtttttctgcttttgctgtttaagcagcatcgacaacggccgaatttcgtgctttccctcatcgctaccgcagccgcattcgcggtgtttgcagttgcaatgcatctattcgtgctgcccacagagcgctatgacggcggcacatataccgtcaccggaaacgtagagtcgttcctcacgaaaagcaacgggcggttctattacaagctgcatgtgacgcacatcgatgagcccgtacaggatgtcgatttttcggtacgcctctcccacagcgaggctttcccggcagagattggcgacacggtcacgtgcgaagcgaagttcttcgcgtttgaagacagcctcgggctctccccgcgcacctcgtggcttgcggataacatggtcttatccgcctatgtcacggattacgaatccgtgcaggtcacgcctgccgaaaagcgcccgttctcatattatgtaaaccaaatccgcacgcattttcacaatttgattttggaaaactaccccaaagccgaaggctctgtgctttccgccatgctgctcggcctgcgggacgatatggaaaccgagcttgtctccgcctacaaaaaggccggtgcttcgcacattttggccatatccggcatgcacatggcggttttgacgcagttcaccctcggttttctgggtctgctcggtctgaagcgccgcccggccgcgctcgtttccgcggtgtttacgctgctttttatgttcgtctcggggctttcggcctctgtggtgcgcagcggtattatgcagctcattttgcttttcggcattcttctcggtcgccaggcggaaccgctcaactcccttgcggtcgccgttttgaccatgagcttattaaacccgttctgcgcgggcgatgtctccctgttgttctcgttttcggcgacgctcggcatcatcctgcttgcgccgcgcatcacaaaagccgtcacgaaaaatattcgcaagccgcagcggaaagcgcaccttgcaaagcttgtttctgcattttccgtctcgctttcggcagtgctttttactgcgccgctgcagctttatttatacggcacggtgcaattcgtttcggtgctcacatcgcttttggcgttggagatttccgcgtggctgctgcggttcgggctcatcgccgccttgctgctcgccgtccccgtcctctccccgtgcgccgcgccgttcgtgtttttaagcggcatttgcgtgaaagcgcagaatttcatcatcacgcttatcgcagagcacattcccggtacgctgcgtatctccggcaaatatctgcccgtaaccgtcgtgatctgcgtccttttcttcacgctttccatgcttctctaccgccgcaaaaataaagcgctgccatgcgttttagcggtgtgcatcctgctttgcggcatgggtgcaaacgcgcttttgaaccaaagcgccgtacgccttgtcgttttccgcaccgattacgccgcctgcacggcgattatcacaaacacctccgccgaggtgctcgggtgcagcggaaatgccgcttccgttgagaccgccctgcgcgcgaacggtgcggagcagatcaaccttttactcgtgcagcctgatgaaaaaagcatccgctgcgtcgaaaagcttgcacagcttttcgacgtcaagcagattctcgtgccggacaccgtatattaccctgcagaaaacgctgcgttttacgatttcagttatgtcggcgtgtttccctccggcagcttcacggtcacggacggcggcgagaccgtcacgttcaccgtaaacggcacggaaatttaccttgaaacgaaacgcagcacgtcgctttcccacgacacagatattttggtgacagaaaaaccgcaaagtgcgatctctgccccgtttacgattttaaaaacaaatggtataatagaggataccgaagcttcgctttcgcccggcgcatacctctttatgacggagcacgaaagcatccggctcgattttgacgagcgcggcacgtacacggtatacggcggctaagccgcaacgaaaggaaaacactatgcccgagatcacggaaaccaaactcaaggagcagattgcaaaagagcaaatcggcagcctttactttttgtacggcgacgaaaagctgctcgtgcgccgcaatttaaatcgcctgttaaaaaaactggacggcaacttcccggaattcaactttcaggaattcccgcacgacgcgcccgtagacagcattgcggacgccgttgtcgccatgccgtttatggcagagcgcaagtgcgtcacggtctccgacctcaacgtggaagccatgaacaccgcggagctcgataagctctacgaattactcgatacgattcctgaaacgaccgtgcttattctttatctgcccacgctcgagatcgacccgaaaaagagcgccaagtggcgcacgtttttaaagaagctcgacacgcgcggcttttccctgccctcgctgcgcctgaaagacaatgagctcgaaaaatacgtctgccgcgaggccgaaaaggcaaactgcctgctctcccgcaagcttgccgagcgcatcgtgcagtacgtcggcaatgacttaaacgccctcacaaacgaagtgacaaagctctgcgcctttgcgggcggcggcgagatcaccgccgagcaggtggaaaaaacggtcacgaaaaacatggaaacaaccgtgtttctcttgagcaacgccctcgtgcgcggcgattacagcaaagtgtatgcgctgcttgatctactgatggcccagcgcgaagaaccgtacacgattctggccgttttaagcagtgcttatatcgacatgtaccgcgtgcgcgccgcgatcgaatccggtaaaacgtccatggcgccgacggaatacggcgattaccgcggccgcgattttagattaaaatatgccgagcgcgacgtgcgcgacctttccatcgaaatgctgcgtgaatgcctttcgcttttactcaactgcgatctttccatcaagctttcgggcggtgaaaacatggacagaatcgcactcgaaaagcttttcgcccagcttttgtacgtcgcgcaccgcggcagcgtggcctaaaggagctcttatgatccacatgaacgaagccctcatcgtcgagggccggtatgacaaaagcaagctttccgcgctgaccgacgctatcatcgtcacaacgaacggctttggcatctacaaggatgctgaaaagcgcgatttcatccgcaagctcgccaaagagcgcggcatcgtcattttgacggacagtgacaacgccggtcggcagatccgcgcgtatatcatgtctttcgtgccgtcaaatcaaattcgccacgcgtatatcccggatatttacggcaaagaaaagcgcaaagcggcgccttccaaagagggcaaactcggcgtagagggcatttcctcggaaattttactggaaattttaaaagaagccggcgcttccgttgagggcagcacaaccgattttcaacccctgaccccggcagacctcatgtctctcggtctcaccggcggcgtaaacagcgccacactacgccaaggcgttttgaaagcacttgacctccccgaaaacctcacgaccaaaatgctcctgcgctgggtgacgagcgaaggaaaaaaggcgcagcttttagccgccgtagaaaaaatcaaaaacggtgcttgacaaaccgaaaagcgccgactataataagcacaatggctgtgaaagaaagaagtacgcgttttcatcggcacagagagcctgcgggtggtgtaagcaggtgcgaaaaaacgccgaaatacattccggagctgtctttttgaacgggttcccagtaaaaaagtccgtgtgcgcacgttacagcgcaagggtatgtttgtacccgttgaggtttcaggtgtgagcctgaaataaactgaggtggtaccgcgaaccacaaaacgaaacgtgttcgccctcatagatcaagtgagggtgttttttatattcaaattcccctccttgaagatcaagggggcttttttattgccccaaaagcccaaaacctgaaaatcgaaaggaacggaacaacatgggtatttacgaagaattgcaggcccgcggcctcattgcacaggtcacggacgaagagcgcatccgcaaccttatcaacaacggcgaagccacgttctacatcggctttgactgcaccgcagacagccttacggccggtcacttcatggcgctgaccttaatgaagcgcctgcagatggcgggcaacaagccgattgccctcatcggcggcggcaccacgatgatcggcgacccgagcggccgcaccgacatgcgcaagatgcttacgatggaagacatcgagcacaacgccgcctgcttcaaacgccagatggaaaacttcatcgatttctccgacggcaaagccctcatggtcaacaatgccgattggctcttaaagctcaattacgtcgagctcctgcgtgaagtgggcgcatgcttctctgtcaacaacatgctgcgcgccgagtgctataagcagcgcatggaaaagggtctctctttccttgagtttaactacatgatcatgcaaagctacgacttttacgccttgttccagaagtacggctgcaatttacagttcggcggcgacgaccagtggagcaacatgctcggcggcacggagctcatccgcagaaagctcggcaaggacgccgcagccatgaccatcaccctgctcaccgattctcagggcaagaagatgggcaaaaccgccggcaacgccgtgtggcttgacccgaacaaaacttccccgttcgatttctaccagtactggagaaacgtagacgacagcgacgttttgaagtgcatcaagatgctgacgttcctgccgcttgacgagattgaaaagatggaaagctgggaaggcagccaactgaaccgcgcaaaagaaatcctcgcgttcgagctcacccagatggtacacggcaccgaggaagcccagaaggcacaggaagccgcacgcgcactgttcggcagcggcgcaaactccgagaacatgccgaccaccgagatcaccgcagccgacctcaccgacggcgcaatcaacattctcgacctcatgcagaaagccggcctcatcgcatctaagggtgagggccgccgtctcgtgcagcagggcggcgtttccgttgacgacgtaaaggtcaccgatatcgccaagacctgcaccgcagccgactttgaaaaaggccatgtcatcatcaaaaaaggcaaaaaggtcttccataaggtcgttttgaagtaagtaaaaaagtatagcaaaaggcatacgctccgttttcaggaacgtatgccttttttgttatgcgctatctaattaccctgaaaaatccagtttctcttgttttgtatttattctcttattttattgtatacttccataccacataatcatccaatgtttcaatattatccacttgaacatttgggctaccatgctcttggaaatacgttaaaatacgcgtttcagacgacgtattgctgacgtaatagacgtttttgcttggcagagctgcaagcgtattttcaaagccgagggactcaatgtagtcctgcacacttgggtggctttgcgtcacaccactcaaaaacaatacatttttcggaaagcaggctcggctgcttttaaacacactaaaatcatagtacagcgtctgaattgccgtgccaaaatctaaaacatataaattttccggcgtttcgttcacttgtgctaagaattcggggcgcagtttgccgggaattacagttttcgtgtatttttccggagaatagcttgccgaataataaaatgtaccgtctacatacatgcgatatgctacagcgtcttctataggtgcagtattgtccggcagatagtttatcccctgccatccgcctaccaggagcgcggcggcacacaacagagcttccgtcgccttgctgcgcttaaaaaacggctcacagaaatacgcgatcaatacggcggcgcagaacagaaaaccaaattctacgcgatagacccaccgtccaagtctgtaaaaatagaccaggaatccgagcaccatcagtgctgacaccgccggcacccaaaactttttgggatttgtaatggcgcagaataatccgagcagcacacagcaaagcgtcatcggataatagagttggcgcaaccgaatcatgctgagcgcttcgcgaatactcggatgcagattcacacgatgtgcattgataatatccaatacttgctgcatcttctctgtactaaacaccgcttgatctgcaaaatcccaatgcagaatcatttgataatcgttttccgatacaccgattgctgtaagttcgtcgcgcagatcttcataatcgcaccaggtgtaatctaatatctgggagcggattttcgtaaatgtatagtattctgtataatctggattggctgtatatgtaagtgcatttacaatattaaacaaaaagatagtaactataaaaactatccctggtacagcaattttaagaaaaaactcatataacttcatctgtttttgcttaaaacaaatcactatatgataaacaacaagtacactagaaaacgctatcgccataaagaaagcgtctctacgaaccaaacatcccgttatagccaacaacgctcctaatacacagcatttcctcctattttgttcaaacagcgcccaaacaaacaacagacatccacacatagatgccacaatcgctgtttttgtaaactgtggcaagatatacagatcacgtgcggcaaaggctgtaatccagacaacagtcagaaccgctgtgccaagacgaagtttctgcacaagtacataagtgagcgcaagaaaagacaaaaagcaaagaagcatttgcagccaaaaataccagcttattgtcgggaaaagactgtacagcggcacaagaagccagccaatgaaaatattggagaacatcatgtgggcatctgggtggccggtatacgcaccggaaaccaccatttccatgatgaaatcatccgaaacctcatattttatactgcaaaaaaaaagaatgcacaacagcagaaccgcctgcgctgctgctaatacgaaaaacaatttctttttgccaaagcgctcctgcaaatcgatcgccggagcgctttgaatctgcggtaaatcgcttgtcattagcgattaccgtacattttctcgtagtagttctgatactcaccgctgatgatggtctcccaccactcacgattatcgaggtaccactggatggtctttttaatgccgtcctcaaacttggtctccggcagccagcccaactcgttatgaatcttggtcgggtcgatggcatagcgcatatcgtggcccttgcgatcgccaacatgcgtgataaggctctccggcttgccgagctccttgcagatgatctttacgatctcgatgttctgcttttcattgtggccgccaacgttgtatacctcgccaacacgacccttatggataatgaggtcaatcgccttgcagtgatcctctacatacagccagtcgcggacattgagaccttcgccgtaaacaggaaggggcttgtctgccagagcattcgcgatcatcagcgggatcagcttctccgggaaatgataaggaccgtaattgttggagcagcgggaaatggtcacaggcagaccgtaggtacggtggtaagccagaaccagcaggtcagcggctgctttggagctgctatacggagagctggtgtggatcggagtttcctcggtgaagaacagatcaggacgatccagcggcaggtcgccgtaaacctcgtcggtagagacctgatggtagcgctggataccgtacttgcggcaagcgtccatcagcacactggtgccgataatatttgtctggaggaagataccaggatcttcgatagaacggtcaacatgagattctgcggcaaagttcaccacaatgtccgtatgctcttcttcaaacagcttatttacagcttcgcggtcgcagatatcggccttcacaaagcggaaattcgggttatccatgacaggcgccagcgtagacaggttgcctgcgtaggtcaacttatcgaggcagacaatgcggtaatccgggtgttctctcagcatgtgaaaaataaaattggaaccaataaatccggcgccgccggtaacgatgatcgtcataatttaactcctttcgctgtagaacttatttctgggtcttgatgttgcgaacggaacttttgatcgtaccttctgcaactgttctcaagtgcgctccatacggggatttaccgtacttttccgcagaatgtagcagttcttctttatcgatccagccgaagcggtaagcaatctcctccggtgcggagatctttacgccctgacgtttttcgaccatacgcacaaaatctgctgcatctacaagactatccattgtaccagtatccagccacgcaaagccacgtccaaacagctccacatccagattaccctgatttaagtacatttcgttgagcgtggtaatttccagctcgccgcgatccgacttctccaccctcttggccagatccgacacacccttgggatagaagtacaggccggtgatggcatagttgctctttggatgctttggcttctcttccacagagatcaccttgcctgcatcatcaaattccacgataccgaagcgttctggatccgttacataatagccaaagatcgtggatatgccgttttcggctctgctgcttgcgttctggagaatgcgggagaaaccatttccgtagaaaatattatcgccgaggatcattgcacacggttcgtcaccgatgaattctttaccgatgagtaacgcctgcgcaagcccttccggcgcttcttgcacagcataagaaagagtgatgccaaactgactgccgtctcccagcagatcgtggaagcgtggggtgtcctccggcgtagagatgatcagaatgtcccggatccccgccagcatcaaggtagacaggggatagtagatcatgggcttgtcgtagactggcagcagttgctttgacgtcaccatagtcagcgggtaaagtctcgtgccggcgccgccggctaaaataattcctttcactgtttgcatcctccgttttactctttggtgttaaaatataacctttatttatccaagggaaagtgagaaaatcacgattcccaacacaataattgcgattccctttagttttcctttcgtaattttctcatgcagaaagaaatagctaagtatcactacaaaaatctgtcccaaagactgccacatgggcgagagtgaaagcggaagtttacgcagcgcaatcaccgagcagactgttgataccacaaaaaggaagtatgcaaagataacagaaaaatttaagtacgctttataccaagcatcatatggcttcattgctgcttttttcagaataatctgtgaaatatccgcaatcagaacagagctgatcgcaattaggaaatacaaccacacgttacttatcccccgatgccataaccttatatatcccgtagcagatcactatcgcaccgaggatctgattccaactgatactctcttgaaacagcagtacactccataccatactccaaatcatggacacagcacgattgctatacgccgttgtcagcgggaccttgcgcaaaatcatctgccacaaaactgcatatacaaataaaattccgatagagcatccataaaacagcagaaactgaattgaaatcatcgggtatcgggacgccaatttctgaaacactccgctaaaggagtatacaatcacagcgccctgcataaaaccgatttgaccaattccagctttttccttgtcatccatgccgattttcacctctgatttgcagcagctccccacttatttctacgttattgcttgcgttccattttttcaagtcagattcgagtcctttccgtttgcctgctgatacactctgattaccgcgcaagcatcctcttgtacagtctcggaacgaggcgttttcctatacaagtcatgacagagttccgtcaaatagcacggaacccctgccttctccgccaaatcaatacaaatttctgtatccttttccatcgtttcaagcgccgcacgagacgaaaaatcatgcttcgtcagcttgggcactctactctggaacatattagaattacctgcacattcagagattgtatcctgcaatacctgcggatcgatccccatagactcgctgaaagacactgcctccgctgctgctgcaatatggattccaaccagcatttgattgactgccttgagcatctggccttgtcccagcttagcgcccacataaacgatcttcttggaataggcctgaaatatatccctgcatacctcaaatacctgactgtcacccgctgccatcgttacaagctttccctgttcggcaccggttacgccaccgcttaccggtgcgtctaaaagtgcaattccctctggacacatttcactgagcaggcgcatttgttccggcgcaatggtactggaaacaatgattattccctttttcattgcagccaacaccccatcagtcccctgcaggcaaccgcggcactgctcataatttgaaaccatcagcaaaatgcggtccgttcgctccgcaatttctccggcagtctccaagacctggattcccatgcgttctgccttctggcgactatacgcactacgcactgtcgtaaaaagttgaaatccacattcttgtagtttgcctgccatgggcgctcccatagcccccagcccaatgattcctaactgcttcatctgattttcttccgcttcacaagttcttctgctgccgctactatgtcagcagccgtcatatgatttgcctcatacagtgcctctgcgtctccggatcttgcaaagcaatcctgaataccaatcatacgcatagaaaccggcaaattcgtagccagcacctctgctacagctccgccaagcccgccaatgacagagtgatcttcgaccgtcacaattgcgccggtctctccggccgctgtaataactgcctcgcggtcaatgggcttgagcgtatgaatctccataatctgcgcattgactccccgggcttccagtgctttcgctgcctttacagtacggtccagcataattcccgtggcaatcagggtaacatcttttccccgacgctttacccaatttgccttgccgatctcaacatgataggttgcttcgtcattgatatcctctacagcgtcaaaaggaagccggacatacagcgggccatggaactccagtgcctttcttgccaacactctggcagaaacagcatctgacggctgaataatggtcatattcggcagggcacgaagaatcgcaatgtcctcaatggctgtatggctgacgccttccgagccagtctgcagccctgcatgagtccccatgaccataacatcctgtttgggatggcaaatatatgttctgagctgttcacaagcacgcatcgttgcaaatacgctgtacgttgccagcacaaccttatgtccgcagctggccaagccgctggctactccaatcaaattttgttctgcgattccaattgaaatctgacgttccggataaatatctccaaaatcctcaaatgagcagcacttggtatctgcacacactgcataataaccatattcctcggcaagccgaatgatctccttgccaaaaataattctgattgggagctggctcatatcaattcctcccttgcatgaatttcagtaatcgcctgctgatactgctcatcggaaataacactccgatgccatttcagcacattttccatataggaaacgccttttccctttacggtgtttgcaataatgaccgtcggagaaccttgatggcgctgtgctagttcaatagccgcatagatctcatcaaagttgtgcccattaatggtaatgacgttccacccaaacccatgccacttttcctccaagggagaaatatccataacatctgctactgttccggtgatttgaagtcggttccggtctacaaaagcaatcaagttatccagtttatggtgtgctgcacacattgcagcctcccaaacaataccctcctgtaactctccatcgccaagaacgcaataagttttataagaacaacctcttaattttgcagaaatcgccattccaacagcagtggaaataccattacctagagaaccggactccatatctacgcccggcgtagacatatccggatatgccgtcagcatagagccggttttacggaatgtcgacagcgtttcacgggggaagaatccgcggcgtgccagcaccgaatacaatgccggcgaggcatggccttttgaaagcacaaatctatctctctccggccagtcgggattctgcggatccacattcattacaccacccaaatagagtgccacaagaatttccacacaagacagcgatgaacccggatggcccattcctgcccgatagatcatttcaataatatcccacctgaccgcctgtgccagctcttcatttgtaaactcgttctttttttccatatcttttcttccctccgacccgtatcagtcaaactgcttcagcacatgtgcctttttacagtcatagcccgagatcagcatctgctcgccattttcatcaagcactttcagagttttctgcacatgatcaatcaacgccagcagacgatctgcatctttcccctgaatgaagattcttgcaaatgtctggttcagcgttcccattgacccttttccgatctcatcaccttcatagtagaactgaatgatattgaggatttccggcattgcacggagcgcttccaatccatcaatccgggtgatttttcccggcttcatcagtgtcagcagaattacatcactgtggtcaaacatcggcttattcttctctgccgcattccagcctgtgcatgcaccgaacagtgcataattcagcatcatctgacagctgtcaatctcattctcagctgcgcagagaatatattcctgtgcgccgcacagacgatagcccatttcaaaaggcaacagcacgccatccaccacaaagcactgcataaacatcgtgccgtccttcatgccgagacctgctgtcatatttttcagtttctcctccagctgttcatagtagagcggaataaaccgacaggggtaaaacaacgcattgggctgcatggccttcccctcctgcacctgattcatgtcacgctcacacatggaagacaacgacagtacaccattttgaagattaaagtacatgcacacatccggataggcagccatataccgctccacgatcacgcgctgattctgcgaaaatttcagtgcatacggaaccgcttcgcaaagctctttctcattttcacagattgaaacacccttgctagcccacgcatctgatggcttcacgatcaccgggtattggatcagctccagatcttcccgtttcaggtcaccatccaaatggaactccggcaccaccgggatcccatattttctgcaggtctctttgaacagcagtttgttggtggttacattgatttgctctttcgttgcataaaacggaagtccaagcgtatctgccaccaggcatgcaggcatcaagttcgcatcagaaaatccagtaaacacgccgtctatctcattttcccttgcaatttccaacacccgatcaatatctgtcgtgctggccaaatatgagcggtccgcaatccgctttgcaggtgaattcggataataatccactacaatcgtatagatacccatgcgtttcgcacgttcaaccgcatcatacatggctcctgttccgccaagaaacaggagcttcttctggttttccatagtctcagcttctttcattgttattccatcgttattccgttgcaatataaaacccatataccatcaggtcattcacgctgtccacccacgccattgtaacattgggattgtaatggcactgaatgaatgccagttcccgctctggcggaaccgtacatatcatgtataccaccgtgccctcaccaattgcctgatagacattgggcatcccccatcgttccaaaacagaaagattggcaggggtccagcacacccaccccccctgaatgcatacattctggtggctagttctggagaaacaggtaaatggtgttgccgtgctggtataggtcagacgtgaaatcgttggcctgtccagcaggaaaaaatcatcaggatatgattccgcatactcaattactttctgataggtatcggtaatctcagctgtgtcatcttctgccgcatgacaaatcgtcaggacacacactgctgcgcaggtcagaatcagcagtgtgcagcccatatcgtgcccaacaccgcccaatgttgtccagatatttttatctgcctgatccacgacacttcgtttccgccagctcagggttccaagataaatacagaacagcagcgccggcgcagtgatcgaataccagactctgtatggcattcgtcccacagaaacaaaataccacatcatcacaaatgccacaaccagggtgcccagcagcaacaggaagcgcttccaatccatacaaaacagcagaaacagcacaaccccaaagaaaaggagccaaaactgccgctgccgaacatcatctggtacctgaaaaaccgctgcaattgcttctgttttaagattcactgcggaataggaagctgactgttctgatttcatgccaaccagtgcttccacaacatcccggttgaacacctctttatccagatagctttggttcgcgaacatatccaaatcctctctggatattcccaaagccatcaatgcctccgcattttcatcatagtctggaacaccgtaatccagcagttccgcacgcattgcattttcctcataataatccagcgcagcaggattactacggtaatacgccatatttgccgtgcgaactccaaccgctaccaaaacactgacacacataaccgcaagtgttttccagttcttcttcatccacgaaagtaacggcatgtccttgtgcgcaaacagcacttcatatcccgcaaacatcgcaagatacggcaatgtaaagtatagggactgataacgcagcatgctgcccatcaacatgagcacgcacccgccaattccacggaacagtttgccctttctcgatgtctcctgcagcatatcggccagcagaactgcccccaccgcaacatataatgctgcgttctgggtaaactgaaacacaatatagtgactctcgcaaagcgctcccacaaaaattatagtcaacgcagccccagccggaaagtgctttgcccggtgcatcaggatataggatgctgttgccagcgaaataaaggaaactcccacagagattatgacataccagttggcagcattattcgtaatcttgtaaagtgcagccaatgccttgcacaaaaacacatttacaaaggcaatatagtatccgtcctcgccgccatagacattcgccagcagattgctgatatcacgatcatcattcgtaccaaactgcatgtggctaaagcaccggcaaatcagtaaaaacagtaaatttattcccagcgcacacaaaatctctctgtgctttttcagccagcttgcaaatgtctttgtcacgcccggactccttcccgctcataattcagcaccgtccgaaccacatattgcggctgttcacattgaatcaggaacacccttccaatatatgcacccaaaatggaaagtgcaaaaaaaaggcatcccccaaggaagaacattgccccaagaaccgcccagaccgctgccgactttcccattacgtccattacaactgcgcaagtccacataacaaggcttaccacacaggatgcgattccaaacattccaatcagacgaagcggcactgtggaaaagctgaaagcaccatcactccatagcttcaaaagctttttcagcgtatagcccgactggccttccagccgctcatgatgctccagctgaacatttacaatttttcttgtatgctgaagcacgtagccaaacatcgagacaaacggggtatcatattcttttaatcgttcaatcagaaatttactgtacgccgcaaaagaagacgtatggatattcttaggcttttgcagtgtcaggcagagcatctctgtgttcagccaactggtaaagcgcttaaacagcgtatgctttttcccatggaactccgcaattgccatgtcagctccggcttcaaccgcctggaccagtggaaaaattcctcgtgcgtcatgctgcccatcatcatccatatacaccagtacgtcaccctgcacatagcgcagcgcagccatctttgcagccgcctgaccaaagtttttggacaattctactcctacgatccgaggatcctccctgcaaagcgtctcaattgtctgaaacgttgcatcttgatccggagaaccgtcattcaccagtaccagctgatattcatattccttatggagtgaaaactgattttgaatatctgccacaacatgcggcagtgtcttggccgatttgtaacatggtatggccacagtcacaagcataaatcacaatccccttttggcgagttaccttaccgttattcattttgagcgggctttcgttgccgcagtgcagctgcgaataagtatcccgctgctgtgcgcttacctccagaacccctttacagtctccaccactgtattgacctcttcctccgtgagcccgtaatacataggcagtcttgtcagccggttgctctccttggtggtataaacgtctttgcccgcaaagcggccaaacttcagtccagcctcggcggaatgcagggggacataatggaacatggagtaaatatcatgctccttcagataggcgatcatggccgtacgctcctctagatcacgaagcttgatccagaacatgtgcgcgttgtggccgcagccctccggaatgtgggcgatttccaacttttcctgctgctccagcggcgcaagacgctcctgatagtggtgccaactggcaagccgagcgttgttgatcttctcggcctcttccagctgtgccagcaggtaggccgcattcatgtcagagggcaaatatgaagaaccatagcccacccaagtatacttatccacctgcccccgcaagaaccggctccggttggtgcctttttcccggaggatctccgcagcctcattgttctcttcatcgcggatcagcagtgcaccgccctcgcccatagagtagttcttggtctcatggaagctgaagcatccaaaatcgccaatggtgcccagtgccttgccatggtaggtactcatgacgccctgtgccgcatcctctaccaccttcagattgtgctttctggcgatttccatgatggtatccatttcacaggccacaccggcataatgaaccggaacaattacgcgggtcttatccgtaatggcagcctcgatcttcgtctcatctatgttcatggtatctggacgaatatccacaaacacaagctttgcaccagccagcacaaaagcattggccgtggaagagaaggtaaagctgggcaggatcacctcatccccgggctccagattacaaagaagagcagccatctccagtgcgtggctgccagaggtagtcaggagcaccttctggcttcctgtcatctgctccagcaattggtggcatttctttgtaaactgtccatcaccacaaattttatgcgctctgattactttggaaatatactccatctctttgcctatataaggcggtctattaaaaggaaccatgtttcttcccactccaaattaattgtttaattacattttaacatataattcgacatattgcaaccgatatgaagtatttttaatgcctttctctgcgttgtagatagatacgacccacagaaggtaaagaaaagagggatagaaaagaatcaggcgttagaaagaatttcacagaggagatcaagagggctttctgttgctccagcgcaaatgatctttgagctttcggtttagatcttttacacttacaaacttttcccagttgtaaaaatagcgccggtcgtttcgatgactccgctctaccttgccgttgtgccagggcgttctgggtggaatcagcttgtgatgcacacctgcgttcttcaaaacaatgtcaaacggacagagtggaacgttgccttttttgtttacaccgtcacatacggcagcagcttctcaagcagcttttcgccgatgccttttacattcgtgagctcgcgcacatttttgtatccaccgtttgcttcgcggtattcgatgattctgtcggcgagtatttctccgatgccgttcaggccaatcaactcttccttcgacgcggtgttgatgttgactttttcttcgcttaaagcggatgcagccggcgcgctcgatgctgcttcgctttgccctgtcgatgtcaccctgtacggttcaagcggtgtattctcaaaggcaacacagaacagcaccgccgcacatgccattaaaaacagcgcgaacagtaaaattgtccgttgacttcccgcgcgcacaagcgctcccccttattcatcctccgcatgcagcgtcttcacaaaatccgtaaaatatggcggcagcggcgcttcaaactccatatattcgcccgtgcgcggatggatgaacccgatgagccccgcgtgcaggcactgcccatgcagctgcgtgatgacttttttcggtccgtagaccgggtcgcccgcgacaggatgcccgatatacgccatgtgcacacggatctggtgcgtgcgtccggtctcaaggcgcaggcgcagctgcgtaaatcccgtaaaattttttgtgacaaaatagtgcgtcacggcgtttctcgcgttcggcgtgttttgtaccgccatgcgctttctatcctgcggatggcgtgcgatgggcgcatccaccgtgccgtcctcgcgaattttcccgtacaccacggcgcggtattcgcgcgtaaagctgtgcgccttgatctgctccgccaagtgccggtgcgcggtgtcgttcttcgcgacgatgagcagcccgctcgtgtccttatcaatgcggtgcacaatgcccgggcgaatcacgccgttgatgcccgaaagcgaatcgccgcagtggtacagcagcgcgttcacaagtgtgccgtcataattgcccgctgccgggtgcaccaccatacccttcggcttgttcaccacaagtaggtcgtcatcttcatatacgatgtcaagcggaatgttctccgccttcacgtcgagcgggcgcgcttcgggaatctccacgcacaaaacgctccccggcgcaagcttcgtgcttttctgcacaatcttattatcgcaggtcacatgcccgtcgcggatcaaattctgcaccgcagagcgggaaagctccggcagcgcctccgcaatcagcttatcggcgcgccagcccgccgctgtgacctcaatctcatgcagctccgccatacttatttcccgaccccgtcggcagtcgtttccgtcggctcgttcacttttttatctgccgcttcttttttgtctttaaagaataagtaccacacggcaaacaaaatcgcaccgaccaccacgcagcagtctgcaaagttgaacacatacggaaaaaacagcacatggatgtaatcgaccacatagccgaaaataaaacggtcaatgaggttaccaatgccgcccgcgatgatgagcacgcacgacgtgcgcgacatccatgtgtggtgcttatagcggaacaaaaacacgagcaacgctgccataagccctatcgtcagtatgatcaaaagccacgaaagcccagcaaaaaagccgaatgccgcgccgttgttttcaaggtaacggaactccaaaaggcccggaatgcacgtcacgctgccgatgggctttaagtttgtgataaccgtcatttttataaactgatcgacagctgtcagcacggcgatcagcaaaagaatgagaatggacaaaagaaatatccccttataacccgaaaaaggcgcaagccgggcaaaaccggtttgcaccttggttcggttcaattattcaacagcacggcgtcattaagcacgtaccgtttaaagcaaattcaatgtgtccgaaattattcggaaagtgcttttgcgcagcgctcgcacagatccacgtatgtcgggtttttgccgaccgtggaggaatatgtccagcagcgcatgcacttgcagccttctgccttatcgacctgcacggagaggccaagtgcatcgtcggaaagtgtgccgccctcgccgtccacgatctcgacctgagatacgatgaacacggttgcaagctcgtcttccacagacttgaggaacgcatacagctcgccggtgcagaacagcgtgacttttgcatcgagcgatgcaccgatcgtcttctctgcacgtgcgttttcaagcgccttcttcacaacatcgcggatggcatggattctatcccagcgtgcgatgaattcttccgtcacgtcgatgccgtacttttcgctcgtcggcttcggcatctcgttgtaaacaacgtggcgtgcatcgcaatcggaagcgtgcggcatgctctgccagatttcgtcggaggtgaacgccaagatcggcgcgaccagacgggtcatcgcatcgaggatgatatacatcgcagtctgcgcggcgcggcgtgcagcggagtccttcttctcggtgtacagacgatccttgatgacatcgagatagaagttcgacatatccacaacgcagaagttatggatggcgtggtaagcctggtggaactcgaaggactcatagccctcgcgcaccttcaccatcagccgatccaaacggttcagcgcccacttatcgatggaaagcatctcggagaccgcaacgctgtcggtatccggattaaaatcagaaaggttgccgagcatatagcgtgctgtgttgcggatctttctgtatgcgtcagaaagctgtttgaggatttccggggagatgcggatatcggcatggtagtcggaagaagcgacccacagacgcaggatatctgcgccgtacttatccacaatctcctgcggcagaatgccgttgccgagggacttactcatctttctgccctgaccgtccacgacccagccgtgtgtgacgacagccttgtacggcgctttgccgcgccatgcaatggacgtgagcagcgaagactggaaccagccgcggtactggtctgcaccctcaaggtacaggtcagccggccaatggagataatcgcgtgtatcgcaaacggcagcatgggtcacgccggaatcaaaccaaacgtccatgatgtcgcgctcttttgtaaaggaggtgcagccgcacttcttgcactttgtgcctgcgggcagaatttcttccgcttccttgatgtaccaagcatcggagccctctgcgcggaacagctcggaaactgcgtgcatcgcgtccttctcgatgagcggctcgccgcagtccttgcagtagaaaatcggaatcggcacaccccagcgacgctgacgggagatacaccagtcgttgcggtcacggaccatggaggagatgcggtcttcgccccagcccgggatccactttacgcccttgatggcttcaatcgcctgatccttgatagcgtccacggagcagaaccactgctcggtcgcacggaacagaaccggcttcttgcagcgccagcagtgcggatactggtggatgatcttctgtaaagcgaacagtgcgcctgtatcctcaaggtgctgtgcaatcgccttgttcgcttcctcggtcgtcaggcctgcaaactgacccgcttcctcggtcatcttgccatggctgtccaccggcacaacgatcggaatttcgggatagtgattgtggcagacgtcatagtcttcgacgccgtggcccggagccgtgtgaacgcagccggtaccgctttccaacgtaacgtggtcgcccacaatgacgagagatgtgcggtcgatgaacgggtgcgccgtcttcatatactcaaggtcgctgccctttaaggtgccaaggatctcgtaatcggtcttgcccgccgcctgcatggcagattcggtcagggccgttgccatcacatagtattcgtcgccggactttacaagtgcatattcaaattccgggccgacgcaaatcgcgacgttcgcggggagcgtccaggtcgtcgtcgtccagattacgaagtaggtcttgctcaggtctgcgcccatcggggtcaaaaggcccttgtcgtccgtcacgcggaacttcacatagatggagtggcagggatcctccgcgtattcaatctcggcttccgccagtgcagtctcgcactccgggcaccagtaaaccggctttaagcccttatagatgaggcccttcgtcgccatttcggagaagatctcgatctgctttgcttcaaattccttgcgcagggtgacatacgggttgtcccattcaccgatgccgccaagacgcttgaaggagttgcgctgctcatcgaggtagccgagggcaaactcgcggcagagcttgcgcagctcgatgtcagagattgcagtggaattcgaaacgcccgctttctttctggccttcagctcggtcggcaagccgtgggtatcccagccgggaacgtacggtgccttaaagccggacatattcttgtagcgaacgataaagtccttcagcgtcttattcagcgccgtgccgaggtggatatcgccgtttgcatacggaggaccgtcgtgcagaacataaagcggcttgccgtcgttcttttcgagaacggtctcgtaaaccttgtcttcataccacttttcgagcattaccggctcgcgcttcggtaggccggcctgcatggcaaagtcggtcttggggaggttcaatgtgcttttgtaatccatatattgatccgtgcctttctgctggttttatcttctcttaaatttaccctttttcttgtcgccttcgtcttcaacgccgaactccagcgtgctgaaaagggcatccttttctttctgcaaagattccgggatgtcggcgtaagcgttcagatcaagaccgatgccgctgaactgctccttaatataagagtccttgtcgtaaacaggctgcggctgtaccggcgccggtgcgggaatcggctccgggacaggtgcgggagcgggcttcggctctgcgggggccggtgcgggttcctcttcgacctgctgtgccgcaggcaccgggatttcttcttccggctcctcaatcacttcgggctcggtgtataccggcgtcggttcctcggcgggcgctttttctttctgctcttcctccggcaagtcaaacgtcggaatcttctcaatcacggcaaggtgttctttatagatgccgtagagcgatgcgcggaagtttgtcacctcgcgcttcatgttctccaactctttctcttttgcggcgatctgcttttcataggacttcacaagcgtttcggagcggcccttcgcatcttttacaagagcgtccgccttcgcgtttgcgtcgttcacaatcttctcggccttcgcctttgcctcacggatggaagcattgccaaggcgctgtgcgctgagaatagcgtccttaataccgtcttcctctgcacggtaagactcaatttttgcagccaaaatagaaagcttctcctgcagctcggcgtttttcgcctgtaactgctgcacagcggcggaatcatccgtcttgcgcgttttaatctctgcgttttcctttgtgagcgccgttacggtctccaaaacttcatcaataaactgatcgacatcatcagaattgtaaccggaaaaacttgattttctgaagctgacttcattgatgtctttaatcgataacatgtgtgtaagcctcctatatgtattttctgcatttcacagataaacggccctttttcgtgaccgggccgagcatatcaacaataaatcgcccgcagcggcgtatggagatgatgtctccttcatttacacggtgcgaaacggaatccgtctccctatggttgacggaaaccaaacccgcgtgcaccatctgcgcggctttttccctgccggtgcccgccaaaaaggcaaccaagcagtctaagcgttccgaagcgaccacgccgcccatcggctgaaagctgtgcgcctgcggcagcggatctgtaaagccctttgtaatctgcacccccacccgaccgatcttatcgatctgcgaaagaaagtgcggcgcaagctctgttttcacaaacagcacagcgcgcccttcttcggccagaatatcgccgagcgatgcacgcaccacgccctgtgccagaaatgagcccataaaatcgcggtgtgaaagcgcatcttgccggcgaaacttcaccgtgagccccgtcaccaggaactcctcatctaagggttccatataatccggaaacacgcccaaaaccgttcgttccgcttcgggaaagccaccgaaaaatcggtaattttccgcatgtgcacggcgcaaatattcttctgcgtacgcgcgctcggaaagatccaaaaagcccaagaacgccggccttttttcgccaaggcgcaggcaatcctctattttcgcttcaaaaagcttgtcttcctgtgcggccatatcagaacgttacgccgttctgtgcaagatcatcgcgaatctccgcaccgctcaggctcacgcccgcaggcgtgaaaatatacgtcttcgcggcgatgggtctcacctcgccgtggttcgcgtaagaagcgccgctgaggaacgccagaatataacgcgcctcgctcgcgttcgtctcttcaaaattcacaacgaccgtatggccctggttgatctcatccgcaatgctatttgtgtcgtcacggaaagagttcggcttaaacacaaccacctgtgcgcctgcgcgtgcgtggttaatgttcacaacgcggttcgagcttgaagaggagaacgaacggcgtgcggaaggctgctcctcgcggctgtctgccgtgggctccgtggcctcgtcctcgtagtattcatcatactcgtcatcgggcgggttccacattttctgaagcttctctacaatgcctgccatatattatacctccattttctgcataacagggtcggtcagcgcgtgtagtcgcgcggaccgaaaagcgaagagccgatgcgcaccatagtggcgccgcactcgatggcctccgcgtaatcggaagacatacccatcgaaaggcaattcataagtacattatctatttttttggcgcggatgtcaataaaagattgatgcatttgggaaaaataattgcatagcgcggatttttccgcacaaattggtggaattgccatcaatccgttcacctgaatgcccggcagcacggcaatttcttccaataactcgagcagcgcagctttttcgatgccgcccttgctttcttccccgccgatattcacttcaatgagcaccggcattttgcggcctattttctccgcaaggcgggaaatttcctttgcaagctttacggaatccaccgactggatgcagtcgaccttatcgatgatatatttcaccttgttcgtctgcaagcgcccgatgatctggccggaaacgcccttgtcccaatcgatcttttcatatttgtccatgaattcctgcacgcgattttcgccgatgaaacgcagaccgcagccgatggcgtggttgatgacctccgccggcacggtcttcgtcgccgcaagaaacgtgatgtcctcgggctttctgccggagcgcaccgctgcctccgcaatgcggttcgtgatgaccttatagttttcctctacgtccctaaaacgctcctcaaagcatttttccgtcataaagatccgtcccttccacaatgacttcatcgtaaagctgtatcgttctcgaggtgacgagctgctctttttccgaggaggaaaggttcagcttgcacacggcatagccgtcgatcgtcgcatcggagaatacctgtacaaagcgcacgcggctgccggacttgatgtaaacgcccttcacgttctgttccacatgctccgtcacattgccgtccgtgtccgtatccgtcacggtcacatccgcaaagtggatggccttttcgttcacgagcacaccggcatacgactgtaaatcgatgcgcagcggctctttgcgcgcggcggcaaggtccgtgttcatgtaagagcactttaaaatgaccactgcgtccccgctcgcttcgtccctattgatcttcacgacctcggccgggattgtctccgccgtcgcaaacggcatctccaccttcacgttcgtcgtgcggtcaagccgcacaaggtcgttttcatcgatgatgcacgcaatgtaccagttgaattcctttgccaccttgccgatgaccgtgctgtccgcattgctgcccgcttcgccttcttccagcgcacgcacatcgcttacggtcagctgctccacatcgtcgatgtccaccgcgttttcgtagccgtccaccgtatggataaaataaccggaagccggcgacgttaccgtgccggtgcttgaagaggttgtcgtctccagcgttgcacgctccgatttcaaattctcaatgtgcgccacatagctcgcggaatcctccgcgcccgtcacgatctgcttttggcccatcaagaggtacaggtcgtttttatcgttcgagatcgacgaaaacgcaccggatttcaaatcggaaagcagccctgtgaccgttttattgatctggctgccgatgttcttcgggttcgaggacgcgacctccgtggggttctccagcacggctagccgcgtaagctcctcgtcgatgcgcagcatgcggttgtgtgcggcggcgtcctcttccgcggggtacagctctgctaccgtgccgccgaacgccgttttctctccatcgtcgagcgtgtagttcaaaacgccgtcgtaccgcgagtacacaagctcctcattgcggataataaagcccgtggtgtcgatggatgcggaaaggtcagcatacatggccgtttccgttttaaatccggtgtattggcttctgtaaatctggtagcctacatatatcaaaagcaaaatcgccacggcgatcgaactgattttacgaaataatgtgttgcttcccatagcggggcttcctttcagtcttcaaaatgcgcgcgggctatgtcctctgccgcgcttatcaggtctgccggggcatcaaaatcatccgcaaaaagccacacggcatcttcctcccggcggaaccacgtcaattggcgcttggcatagcgccgcgtttccctttttatattttcctttgcttcgtctaaggagcactgcccctcaaaatacgggaacagctccttgtagccgatggcctgcacggaggtctgccccggcgtgccataccgcttaaaataatcctcggcttcttttaataggccgtctgcaaacatctgctccacgcgcaggttgatacgcccgtaaagcgtctcgcggtctctgaaagacagcaccaacattttcccgtcatacggcgattccaccgctttcgagtccttcgcctgcttcgagaacggctcgcccgtcaccatgcagtattcaagcgcgcggatgaccctacgcgtattattcggatggataccctcggccccctcgggatcaagctcttttagccgcgcataaagcggttcaatgccgtctgccgcaaattccgcttccaaattaccgcggatttcatcgtcacggctgttttccgtaaacggcaccgcctttaaaagcgagcgcgcatataagcccgtgccaccgacaagcaacacgtttttgccacgcgcatgtatgtcttcgatcacctttcccgcaagcgccacatagtcactcacgctgaacggctccgcggggtcctgaaaacccatcaggtggtgcggcacaccctgcatctcgtccgcggtcggctttgccgtgccgatctccatgcccctataaatctgcatcgagtcacacgaaaccacctccgcatggagctttttcgcaagcgttacggaaagcgaggtcttgccggaggccgtcggcccgcacaccgcaaataccttgattttctcttgtacttccgtcattccggcgcctccttttgtttacataactttataataacacaactttcgcccgtgtttgtgagcaaaccgttaaactctgccgaattctttttccagcgttcgctttttcagcatcacgtagatcggtctgccgtgcgggcagtagcgcacatcggggttcgcttccagctcttccgcaagtgcaatgagctcctcttttttcgaggcgttcccacccttaatggctgcgcggcacgcaatgttgtggtacagccagtccatgtgctccgtcgtcgcgtcggtcttgttttcttcaaggtatcccgccatttcgagcacggagtccttgatgtccgcaccgttcaaattaagcggcgcgctgcgcaccaaaacggtaccgctgccgaaatcctccacgtcaaagcccgcctgctcaaaaacactcaaattctgtaaaaccgccgtgtactcgtttttgtccatcgtcaccgtcacgggcacaagcagcgtctgcgccatagcagcttcttcgcgccgtttgagcttttcgtacagcaagcgctcgtgcgccgcgtgcttgtcaataaacatcagcgtctgcgcgtcgtattcaaggatgatatacgtgtcaaacacctcgccgatcaccttatgcgccgtgcgggacaaatcccgctctgtctccggcacaatgcgtattttcggctgtgcgtcgctttccggattttcctgcaccgcttccgtctgcacgggctccgtctcgggcggctgcggtaagggcggttcttccgttatcacttccgactttgtcaccggctgcggctctgcctccaaaacgcgctcgatcgacgtacgaatactttcaagctgcggcttttcctcccgctctgcgctgtccgagaacgtatgcggcatcggcggcatatcgacgggcggctcatacggcgcttccgcctcttttttgctcgtgttgataacgggcgcagacttcacgaccggcgcaggcatcggcttcaccgtctccgttttcggcggttgattcagcaccatctgctgcggctttacgaccacatccggcttatacgggtcgacgggccgtcttgcgtgctgcgcaaggtcaacggacttcatatcacgactcgctgtcacagcggatttcaccccgtggtacaccgcatcaaacaccggacgctcgttcacaaagcgcacctccagcttcgccggatgcacgttcacgtcgacgaccgacgacggcagctcgatgtgcagcacgcatgccgggaatttacccaccataatcgcgcccttgtacgcttcctccagcgccacacacgccgtgcggctgcgcacaaaacgcccgttgatgaagaaattctgcatgctgcggttcggtcggctcgcaatcggcgacgagatatatccgtgcacgcgaatgccgcccaaggtataatccaccggcagcaaagcgccggaaaactccttgccgaacaccgcatagatcgccgagctcagcttgccgtcgcccggcgtgtgcagcacttccttgccctcgcgaatgaggcggaacgagatttccggatgcgaaagcgcaattttgtccatcagccccgccacagagttgccctctgcggtgtctttcttcagaaacttcatacgcgccggtacgttaaaaaacaggtcgcgcgccgtaatggtcgtgccaagtgggcagcccgcgtcttcgatctccacgtcgccgccgccctcggaggaatagtgcgtgccgattgaactgtccgccgtgcgcgtgatgaggtcaacgcgcgacacagccgaaatggacgccagcgcctcaccgcggaagccgagcgtcaaaatcgcgtctaagtcgtccttttcgcgcaccttgctcgttgcatggcgcagaaatgccgtcgccacgtcctcgcgcgcaatgccgcagccattgtccgtcacacggatatacgtcacgccgccgcggcgaatttccaccgtgacaatcgacgcgccggagtcaatggagttttccacaagctccttaatgacggaagacgggcgctccaccacctcaccggcagcgatcagctccgcgacctgcttttccaaaacgtgaattctcggcattttctgcaccttcctttcgcgctaaatttatttcagcatatttgcaagttcaaacaaaatgttcatggattcgatcggcgtcagcgtgttgacgtccaagcttttcaggcggtttaaaacctccgtgtcctttgtcagcatcgtcagctgtatcggttcctcctgctgcactttcacggtatttttcggttttttcaccatctcgccgctttcaaggctctttaatacctctttcgcacgccgcaccaccttgtccggcacgcccgcgagcttcgcgacctcaataccgaagctgtcgtccgcgccgccgcgcacgatacgccgcaggaacgtgatgtcgtccccgcgctttttcaccgcaatactgaagttctgcacaccgggcaaaaggtcttccagctccgtcagctcgtggtaatgcgtcgcaaacagcgtcttcgcaccgcacagctttttgtcgtgtacgtattcgatgaccgcccgcgcaatgctcatgccgtcaaacgtcgaggtgccgcggccgatctcatctaaaatcagcaagctgtccttcgtggcgctcttcaaaatttccgccacctcggccatttccaccatgaacgtggactgccccgccgcaaggtcgtcagaagcgcccacgcgcgtgtagatgccgtccacaatgccgatctccgccgcgctcgccggcacaaaacagccgatctgcgccatgatgacaatgaccgccacctgccgcatatatgtagatttacccgccatgttcgggcccgtaatgatagacacacggttctgattcgggtccatctcaaggtcgttcggcacaaacggcgcgctgcccgtcagcagcgcctccaccaccgggtgccggctgtcctttaaatacagcctgccgttcgccgtaatggtcgggcgcgtgtagtcgttccgcacagataccgccgcaaacgatgccaaaacatccagttccgcaatcgccttcgccgtctcctgcacgcgggtcagctgctccgcaatcgtcctgcgcacttcttcaaacagcttgccctcaagtgcaatagaacggtcgtgcgcacctaagatgcggttttcaagctcctttaattcctgcgtgatgtaccgctcgccgtttgcaagcgtctgcttgcgcacgtagtgctccggcgtcttgtccttaaacgcgttcgagacttcaaggtaatacccgaacacgcggttataccccacgcgcagtttcggaatgcccgtcgcttcgcgctcgcgcgcctccagctcagcgatgagctgcttgccgttcgtcatgtcacttttcacttcgtcaagctccgcgttgaagccctcgcggataatgccgccctcacggatcgtgtgcggcggctcctccacaacggcgcggtcgatgagttcgcaaatatcggagagcacatccatgcggctgtcgatgtcgcgcagcatcgtcgctttaaacgtcgcagaaagcgctttcagctgcggcaagcgcgtcagcgccgaccacagcgcacgcaggtctttgccgtttacagagccgtacaccacgcgcgtcataatgcgctccaggtcaaaaatgcccgtcagcgcctcggtcacatcgtctaaaagcgggcggttttcaaacatctcctccaccgcgttttgccgcagcgtaatgcccgccgggctcaaaagcggctgctcgagccatgtgcggataagccgcttgcccatcgccgttttggtcttgtcaagcacccacaaaagcgagccgcggcgctccttgctgcgcatcgtctcgagtaactcaaggtttcggcgcgtgtttaaatcaagccgcatcgtcttcgcctgcgaatatatgcgaatttcctccatgcgctccaaacccgtgatttgcgtccggctgagatactcaagcaaagcgctcagcgccgccgtgatctccgggaaattcaaaacgtcggagcgttccaaaacctcggggtgaaactgcgcctttacagtttcttccgcgtgcagcggttcgtaaaccgcaaaatccatgcactcgagcgacgccgaaagcttatcggaaatgaatttcgccacgtccgtcaaatcggtaaattccgggttgatgagaatttcgcgcggcgtaaatcgcgacagcgcgtcgatgaccgcgcgggagagcatctcgcccttctccgccgtcagcgtcgtcgcctccagctcgcccgttgaaatatccgcaaagcagatgcccaccttatcaccctgataatacgcggaagcgatgtagttgttcttcgcctcgtcgagcatgctgctttccataacggtgccgggcgtgatgacgcgaataacgctgcgctttacgatgccctttgcaagcgccgggtcttccatctgctcgcagatggcgaccttgtagccctttgccacaagccgcgcgatatacgtctccgcgctgtggaacggcacgccgcacatcggcgcgcgctcctcctggccgcagtcacggcctgtcagcgtcagctccagctcacgcgacgcgattttcgcatcgttaaagaacatctcgtaaaagtccccaaggcgaaagaaaagaagcgtgttcgggtacttttccttcacttcaaagtactgtttcatcatcggggaataatcagccatgcccggcctccatatcgttaagattcagtcaccaagtgaattactaccaaaggcagatttttgtaaagtaggtgcgcgagatgcgccgtcagatttttcgtcatgagcgtatacgccttgcgtagtaaattccgcaggcaggctggcgcctgtcaaggactttacgaccggtatggcggaaaagatgcaagcagatcacgtacaaactttgcaaaattctgccttagtggcagccaccgccgcaggtcgcacagctgccggtgcagccgcaggcatcgggatcgcaaccatccgggtcctgaccctccgcgcacatggaaagcacacccgtcacgcgctgcatcagcgcatcaaactcgttctttgccgcctgatacgccgccatgtgctcgttctgcatcactctgccgtaaatctcgcgcagttctttgttgtactgctcgataagctcctcgctgcggtcttcctttcccgcctcgttgttgatggccatacgctttaagttgaattcgccgatggcgttctgcaaagcttcgtcctcgttgcactgctgttccgcaacgctcatgttgatgtaggtctggtcctgctgcaaagcgcggccgagttctcttgtcagtttcatgatatccatagtaatagctccttaaaataaattataaattttattgtattttgaaaaagcaatgggtcaaaacccgttttgcttagtctacacattcgccgcgcaaaatccagttgcgcgcttcggtcacttttacatttttgaattcgccgatccactcgtcttcgccggggaattccacaatgatgctgcttgcggtgcgaccgctgagcaaaccgtttttctcgttgcgctcttcaatgagcacacgctccgtgctgcccaccatggaagcgcagcgctttgccgcaatctcctcctgcgtcttcaaaagctccgagaaccactgcgttttctccttgtacgtgacagggtcttccatttcggcggctctcgtgccggggcgcggcgagaaaataaacgtaaagagcgacgtgaactccacctcgcggatgaggctcagcgtctcgcagaactcctcatacgtctcgcccggaaagccgacgataatatcggaggtcagcgacagatcgggcattttctctttcgcatagcggatgaggtcaaggtatttttcgcggtcatagtggcggttcatcgcctttaacacacggctgctgccggactggcacggcaggtggatgtagtggcagatgtgccggctctccgcaatcgtgtcaaacagctcatgcgtcgcgtccttcgggtgcgaggtcataaagcgcaaacggtagtcgccgtcaatcgcgtcaatgcggcgcagaagctccgaaaaattcactttctccggcaagcccttgccgtaggaattcacgttctgtccaagcagcgtaatttctttgtagccctgctcaatgagctcgcggcactcggcgacgatggcatccgggtggcggctcttttcccggccgcgcacatacggcacaatgcagtacgagcagaaattgtcgcagccgtacatcacggtcacccacgcgcgtgtgttgccgtcgcggcgcaccggcagaccttcaatgatctccttcgattcatgcccgcgcaaaaaaacgcgcttcgagtcggtcacggcggtgtacatcatctccggcagtcggtggatgacgtgcgtgccgaacacgatgttcacaaacgggaacgacgccttaatgcgctccgccacgcgctcctgctccatcatgcagccgcatacggcaatgagcagcgacgggttgcggcgtttcacatttttcagcgcgccgatgttgccgaacacgcggtcttcggcgtgctcgcgaatggcgcaggtgttgaacagaataaaatcggcttcatcttcatcttcagtgaattcaaagcccatttcagagagcatacccttaatgcgttcgccgtccgccacattctgctggcagccatacgtgcgcacaagcgcctttggcgtgccgtgcatcgcgcgcacctgcatgatcgccgcaacgtccgccgtgtatagcttctgcttttgcagctcgtctgccgtaacggtgatttctttatccttcaaaaaacattctcctttatcgcacgcagacaagctgtctgcggtaagctgtcataatgatacagagtatactataccacaaatcggcatgattcgcaaggcgaaatccaccgtttcccaatatttacaatttcgcaacacgtatttcccgcaatacgcaaaaacggcggctctaaaaaccaaagccgccgttaaacttattcgattgtcactttcgtgccgcccgcgctgcgcacggagagcacatagcagctcttttcgccaaacacgctctgcatctctgccttgaacgcgtccagcatatcgagcggcacatacgcctgcaccgtgccggcaaagccgccgccgtgtacgcggtatgcgcccttgccaccgaggatcttcgcgataagcgccagcgcgagggacaagccctgctcctgcgggttcacaactgcgaacacattctgcaaattcattgccgaggaatgacccgaggcaatcacgcactgcttgaacgtctcaaaatcccccgctttcagcgctgcaacttccttatccaccacgcggttgtcgtcgaagaaatgaatcgcacgcaaaatcgcgcggtcgccgacttcttttctgagctcgggaattttcttataaaactcctcctcgcttacctcgcgcagcacttcgccgccaagcgccttcgcaacgcgcttcatctccgccggaatggctgcgtattcgccggtcaggtcggcatggtttccgcccgtatcgacgacgcacagcgcatagccgtaacggtcgaggtcaaaatcgatcttctcaatcttcggcgcggaaaggtctttaaagtccatcgtcgtaaagccgcccacactcgctgccatctggtcgagtaagccggagggcttgccgaagtacacgttttcggcaaattttgagatctgtgccgcctccacggggtcgatcgcgtcgtcattatacaggtggcttaaaatcgtcaccacaagcacctcaaacgccgcggagcttgaaagaccagagccctttaaaactcttgaggtcgtcgccgcgtcaaagccgcccacttcatagccgagcgcctttaagcgtgcgcacacgccgcggatgagcgacgccgagcgctccttttccgcttcctgcacgttaaggtctgccgtatcgaccgtgtccatcgggaacccgacggatttcaggcggatcacgccgttctcggtcttcttcaccgccgcaataacatccagattcacagccgccgccagcaccttgccgttgttgtggtcggtgtggttgccgcccacctcggttctgcccggcgcactgaaatatgaaagtgcattagcatccccgaactcctccgcaaagtaagtggaaagctcctcataacgtttctgctgctcggtcgcttccgcgccgtacagtgtttttaaatcgatgaccatgttgaaaaacctcccggtttattttttgagcatctgtgtaaattttaatttatgtactttagattcgataaacgggcggaacctttccaacgtttccttttccatgtcttcttttctgaataccatggatttgccgttatcaaaatacatgatgtagtgctgtctgctctcgcccacgtcgatcatgtgcttgtaatcgaccttgatgcggttgccgtttttcatgttgatgacgctgttcgtcatgaaaataagcgtcgtctccgtcaggtgcatcacagcaggattattgttgcgaattttagaaagccagcgcgtgcagcgaatgacaacaatcagcgtaatcgccacatacatgataagcagcgataaaatgaaattgcccacgtaaaaatgccccgcgttgaacgcaaagaggaacgagaacacgagcggcacgatgataaacgccgggatgagccacttaaagcgcccaagcgtagagtaataaatgaatgccttgtagtcgtcctcgccaatttggctcgtcacgcggaattcttctttttccggcgctttcttttcttccgccttcttctccttgtccttcggcgtttcctttcccgtcagctcgcggatatagcggtcaatgtcctcatcggtctccacggctttttcaagcgcttcgtccgtttttctttcttccgccattatgcttcgttcctttccgtgttgtcctcaccgtttaaaagcgtcaaaagctccgcttccgtcaatacggggatgcccagcgtctgcgccttcgtaagcttgctgccggcttcttcgcccgccacaacatagcttgtctttttcgagaccgagccgctcaccttgccgcccgccttttcaatcagcgctgcggcctccgtgcgcttcaaattcggcagcgtacccgtcagcacaaacgtcttgccaagaaatttcgtgtccgtcgtgaccgcttccgccgtcatgttcacgcccgccgcttttagccgatcaatgagctctatcgccgagtgtcttctgaaaaatgcgtagacctcctgcgccataatgccgccaaagccgtctatcgccgcaatctgctcctcgtccgccgcaatcaaagcatccatatttccgaacgcgcccgcaagcagctttgccgccttcgcgccaatgtgcggaatgccgagcgcaaacagcagctttgataaatcgttttctttcgatttttggatcgccgcaacgaggttttccgcgctctttttgccgaaacgatcaagcgtttcaagctcctgtgccgtaatgtcgtataaatcagccggcgagtgcacctgaagcgctgcgctcagctgctccagcgccgccggtcccaatccgtcaatgtccatcgcgtcgcgcgacgcaaaatgaatgaggttgcgcatcagctgtgccgggcactgcgggttcgtgcagcgcgctgccgcttccccctccacacgcgtgataacttccccgcacgaggggcacgtttccggcaaacggtacggcacggtatcctccgggttcgagaccacggaaacgacctccggaatgatctcgcccgcttttcggataatgacgcgcgagccgatgcggatatccttttccgtgatgaaatcctggttgtgcagcgtcgcgcggctgaccgtcgtaccggctaagaacaccggctcaaacacgccggtcggcgtcaaaacacccgtgcgccctacagcaacttctatgtcaaggagcgtcgtctctttttcctccggcgggtacttgtacgcctccgcccagcgcgggaacttcgccgtgcttccgagtgcctcgcgctgagagaaactgtccacttttacaacagcgccgtcaatcgggtacgagaacgtgccgcgctcgttgccgatctcgcggattttctcgattaccgtctctatgtcgcccgtgcggcaataaagcggcgacaccgtaaaaccaagctcgtgcaaacgcttcaatgcgtccgcgtgcgtcgtgacggtctcaccctcgatgacctgaatgttaaaaacaaaaatatccagcgtgcgctgcgccgtaatcttcgggtctttctgtcgaagcgaccccgccgccgcgttgcgcgggtttttaaacggcttttcttccaaaagctcctgccgctcgcacagccgcaaaaagctttcgtccgacatatatacctcgccgcgcacctccaaaaacggcagcggctctttgagcgtcttcggtacggatttgatcgtaccgatattcaacgtcacgtcttcgcccgtaatgccgtcgccgcgcgtagagccgcgcgtgtacacgccgttcacgtattccaacgccacggaaaggccgtcgaatttcggctctaccacatacaccgggtcgtccacaacggcgcgcacgcggcggtcaaagtcgcgcagctcgtcttcggaaaacgagtcgtgcaggctctccatcggcacggtgtgcgtcacttccgcaaatgtgttgtaccccgctgcgcccacacggttcgtcggcgagtcctctgttttcagctccgggaacgccgcttccagattttccaagcggcggtacagcatgtcgtacgcatagtcgctgatctccggcgcgtcctcggtgtagtattttttattgtggtactcgatctgttcccgcagcgcctcaatctgctgccgggcctgttcgtgcgtcataagttaaaactccgtgtcatttcaagatatttcgatacttgttagtatcttaccacaaagcgcgcaaaaatccaacggttattcacaattttttatcctgcgcgcaccacgccgtactgcggcacgtcgcccgcaagcaccgcttcatacacgggatatgctgccgtcaccgtcacaggctccgccccgtctcgctccgccgtgaacagcaccgcttcaatatgcagcaccgttcggtacgccgtgcggttgatgcccgcgcccgtcaagacgctttcaaaccgcaccgaaaccgcactttccaccgaaaaccgcacgggtatcttcatcccgcgcccgttcaaaagcatcagccccgttaaatttccgagcggcacaaacgcctttgccgtgccgttcaagcttttccgcaaagcatccgtcagctccgcttccagtacgccgagcgcatatgtagaaagcgccgtctctgccccgtccttttcgcagacggtctgcggcagatactccggcaccgttttcgcgatgcacccttgcgcgtgcgccgtcagcgctgccatgcgcagttccgctttcatcgcgggcagtcgcagctcggcaaatacaaaagcgaaaacgagcagcaaaaacgccaacacgcgccgtttacgtccgcgtttataccgtcttcggcgataccggtacataaatcatcagtcctttccgatacgccagtatacgccgaaaaggactgatcgtgcctgtcttatattttgtctgcctttaaaagctttttcgcttcctgcatcacgtgcgccgcaggcagaccgaaaatgttgttgtagtcgccctcaatactctctacgaacagcgccgccgggccctgaatgccgtagccgccggccttgcccatcggctcgccgctctgcacgtaagccgcgatttcgctttctgtcaggggatagaactttaccttcgtctcctgactgaacgaaacgcgctcgccgtgatacgccatgcacacgccggtaaacaccgtgtgcacatgcccggaaagcaggtgcatgaaacggtttgcgtccgctaagtctttcggtttgccaagaatttcgccgtcgatgtacaccaccgtgtccgccgcaattacaagatcgccactttcgcacttcggcaaaaccgcttccagcttgcggcgggaaagctcctttacaagcgcgtccggcgccttcggcccgttcgattcatcggcattcgagacgatcaccgtaaactcgatgcccgcgcgttccagaatctccttgcggttcacggaggacgaggctaaaacgaagcgtgccatcagccgttgtagccgttcgggttctgcgtctgccagcgccaggagtccgcacacatgtcgtccagcgtcttctgcgccttccagccgagctcctcatacgccttcgtgcagtctgcgtagcactccgggatgtcgcccgcgcggcgcggcttgatctcatacggaatcttgtggccgacgcacttttcaaacgcgtgcacaatgtcaagcacagagtaacccacaccggtgccgaggttgtagatcttcacgccgcagtgcggatcgtcgaatttcttgagcgccgccacatggccctctgcaaggtcgacgacatgaatgtaatcgcgcacgccggtgccgtccttcgtcgggtagtcgtcgccgaaaacaccgaggcagcgcagcttgcccaccgccacctgcgtgatgtacggcacaaggttgttcgggatgccattcgggtcttcgccgatggtgccgctcttgtgcgcgcccaccggattgaagtagcgcaggatgatcgggttaaaatccgggtttgcgtgcgcgtagtccttcaaaatgcgctcaatcatcagctttgtcgtgccgtaggggttcgtcgtcgaaagcgggaaatcctcgcggatcggcacggaagccgggttgccgtacaccgtcgccgaggagctgaacacaaagttgttcaccttaaattccgccatcaccttcaaaaggctcaaagtcgaaatgaggttgttttcatagtaacgcaacggaatctgcacggattcgccgactgccttcaggcctgcaaaatggataacggcaaaaatctcatcctccgcaaaaatcttgcgcagcgcgtcttcgtcgcacacgtccgcttcaaagaacttcacttttttgccgctcaaattttcaatgcggtctaccaccagcgccttgctgtttacaaggttatccacgatcgtcacatcgtagcccttttcaaggagagaaatgcaggtgtggctgccaatgtagcctgtgcctcccgtaaccaaaattcttttcataagaaaccgacctttctgtctttctgtctgtactgattatacacagtttccgccgctttgtacagtagcatgcgtatcttttttgatgcttatttatttcgattttgttgcttcttttgcaataggcgtacaaaaagcgggcatactgaaaaggaaagtcatgaaaaaggagtcgtttcccatgaaccgtaccgtccgcaaaaacagtctgttgttcctcgccggcagcggcctttatccccttttggaagtgctgtggcgcggctattcccacgcctccatggcacttgccggcggcgtttgtctgctgctcatcaacgccgtatgctgcgaaaaaatgaaaagaagaagccttccggcgcgctgcgccataggctccctcatcataaccgttgtggaatttttattcggcctgctcgtaaaccgcgtgcttcatttgcacgtgtgggattactccgccctgccgctcaacatcatgggccagatctgtctgccgttttcgctcatctggttcgttttaacgatccccgcaagcgccctgtgcaagctctgctgccgcctttccgccttcccgaaagagacaaaatcagcctcggtcatcacagacccttgatatatttttggaacaccggcaaaatgccgatcttgtccggcgcctgcaacggcatctgcgggaacgcgtcatgacccggcatgttgttcgcttcaataaagagcgggccgtcttttgtgatcgccacgtcccagccgatgtagcccatctgaggcaccttgtgcgccgcttcccggcaaatgtccatcaccttgtcccagtacggaatccggtagcccttgagcaagcaccccgaacgcgggtggcgctcatagacgatgcgctgcttgtcgcacgccgcgcacgcgattttgccggtctcgaggtcgatcggcgaatacatgccgccggcattgatgttatccaccggtcggtcgctgttgcccatgcggatgcacgcgtacaccacgttcgatacgccgtcggaaagcaccgtgtacacgcggatggtattgacggagccggggttgatgcggttcatatccgggtgctgaatgacaacctcttcgatcacgtccgcgccctttttctttaagtcctcatacatggcgtcgagcgttgcgtagtcggcctttttcagcttttccacacccacgccgcaggaagcgtcgtccggcttgcagatgatctcgtctttgtcctgcataaagtccaaaaactgctcttttgtgcacttggaaaaatgcagccactcgcggtgcagatattccgcaaacgtcgtgtaaaactcgcttttattatcaaaaatatggtaatacgcggggtcgttgaggctttttacaatggagttattgatgccgcgcgtcacatacgtcgcacgctgcttgtcattcaggtcataaaacgcgcataaaaggtaatctttatagcccgcgccgtacttaaagccgcacttgatgatgtcaaaaaacagccaaatacggtttttaccgctcacctcatgcaccgttttcaccgtatcgaacagcgatttataatccatgtgcagcatgcagtgaaaaatatatttcagtcttcccataagccgccccttcttacagccccatcagctttttctgcttctctaaaatgcgtgcgcggcggcgctcggtctcctccacgtcgatggaaagcgcaccgtcatcggtaatcttcagcacgtcaccggcctttgcaccctgcggcagctcgctcgtttcaatggcgaaaaacgccttgtccttgtcttcgcagatcgcgtaaataccgtcaaagcggtcgatggtgatttgtttcatatcatctgttcctttccgtaataccttttatataacagcgggttatttcccgttttccgtgtaaattttcgtttcagcaccgtccgtcaaaatcgcaataccgccgttttcgtccgtgcggaaaatttcaacgccgtggtcggcgagccgtttcagcgtctcgtttcgcggaagcagatttctgtcttcgcccgaggagattaccgcatactgcggttgcacagcttcaagcaatgcatcgcttgtcgccgaagcgctgccgtggtgcggcaccttcaaaacatccgcccgcagcgtgtcgccatatatatccagcagccgtctttccgctttctcctcaatatcaccgcagaacagcatggaaaatcccttgtagcaaagcttatacacaagcgaattctcattcgtgctctctaagtcttctaaaggcgcgagcacccgaaattccgcctcgccgtaagagaccgtctccccggcgcttaccgttcgcacagtttgatcttccggcagcccggtcagctccgtgtacatggaggtgaccacctcctctgcggacacctcccgcaaaagttgcgtcagcccgcccacgtggtcgctgtccgcgtgcgagatccacacggcgcgcagcttctgaatgttccgctgttttaaaacgcgcagcacggttttcgcctgctccgctgtcgcgcagtccgaaagcactgcgccctccggcgtttcgattaagattgcatccgccttgcccacgtcgatgacataaaccgtcaaatcggcatcgggcaagctctgtgcaaacggcagcaggccgcatacgcggcggagctccgtccacatcgcccgtccgggcggcgtataacaaaacgccgaaagaagcaaaacaagtaccaacgcgcctgtgcgcacaagctttctgccgtcccgtgcaccgcgctttgtgttacgcatcaccgggggtatcctgcttttgcatgttcatttccagccactgcgcataggtgatgagtacttggcgcggcttcgagccctcgtgcggacccacaatacccatctgctccatctcatcaatgagacggcccgcgcgggcgtagccgagacgcagtctgcgctgcaaaagcgacgtggaggcctggcccgcttcaacgacgcacttgatggcctcgttcatcatcgggtcaccgctgccctcatcgtcattgctgccgctgtcgctcgattttgagccctccacagcgctgcgctcaatctcctgcgcaatggagtcatcgtaaataacgcttctcgaattcttcacgaaatccacgacggattcgatctcgctgtcgctgacaaagcagccctgaatacgcagcggcttctgcgcgccgaccggcgagaacagcatatcgccctgaccgagcagcttttccgcaccgccgctgtccaaaatggtgcgggagtcaatggcagaggacaccgcaaacgcgatacgactcgggatgttcgccttgatgaggcctgtcacaacgtccacggacgggcgctgcgttgcgaccacaaggtgcatgccggcggcacgcgccatctgcgccaagcggcagatcgcgtcctccacctcgttcggcgcggccatcatcaggtcggaaagctcgtcgatgatgatgacgatctgcggcattttgtgcatgggctgtccgttttcgtcctgataattgttcgcctgcgcgagggcgttgtagccctttaagtcgcgcacgttgttttcggcaaaaattttgtagcgcttcagcatttccgtaacggcccagttcagcgcaccggccgcctttcgcgggtcggtgacgaccggcaccaataggtgtggaatgccgttataaatgccgagctccacgaccttcggatcaatcatcaaaaagcgcacatcgtccgggccggatttatacagcaggctcacgataagcgagttgatgcacacggatttaccggagccggtcgtaccggcaatgaggatatgcggcattttgctgaggtctgccaccgttacctgaccggcaatatcgcggccaagtgccacggtcaagtgactttttgaggtcacaaagctgttcgattccacaagctcgcgcatgcgcacgatggtcttcaccttgttcggcacctcaatgccgacggccgccttgcccgggatcggcgcctcaatgcgcacgcccgttgcggcaaggttcattgcaaggtcatcggcgaggttcgtgatcttgctgattttcacaccggcggcaggctgcaattcatagcgcgtaacagccgggccgcggcaaatatcgagaattttggtttgcacaccgaagcttttcagtgtttccacaagcagcttgccgtttgtctggagctcttcggtctccacggcggcatctacttttttgccggaagcgagcatcgtaaccggtgggaagatgtacgagctgtcttcctccttcggtgcagattgcgcaggctgggtctccatgcgttctgcttccagcttctttttcatgaattcttccgtcgccttctgtgcgtccgcggcggcttccgcgctgtgcgcgggcgtcaccgacgaccccggcgcgaggattgtcggtgcggccggctgcggcgcaggctgtgcatacgcactctgctgcacaggtgcagactccggctttgccgtctgcataacgggcggcataatcaccggcgcttccaccgtttcacgttccaccggcacgtggatctccggcgtttcggcgggctgcggcgcggggcgcacttccgcctgcaccggcggcgtataggtcggctgcacattttgcgcaggctgtgcttcatgctctaagccgggcacgcggaaatccggcacacggcggttttcgtcgatcaatgcgttgatctgtgcggagctttcggtgtaatcgtgcagcactatggggtcgttatccggctccgtgcggcgcacaccgaaaagctgctccaaatacacgcgcggcgtctttcctttgtttttcgattccattttaccatcctccgggacagagcgcaccgggtgctgcggcaaaaccgtttcaaacggcgattcctccgcattaccgcgctcctcttccagaatgcggcgctcttccttgcgctgccgcgcgacgtcgcgaatgacgaccgccggctttgcaatttttttaaaaaagctcgcgagcgacgtgcccgtaaagatgagcacggaaacgaacagcagcacgcccgtgatgatgcgtgcgccgagcacttccgcgcacttgacgagcagctcgccgacaaggccgccgacaagaccggccccgccctgctctacgccgtgcatatataagatgccgaccagcttaaaaaaactcttttctttcgggaaaaagctgccaaacacatgccccgccgtgcaaaacagcacgacaatcacgaccatgagcgccaagcgcccgccgcgcagcatggtggtctgctccatcgttttgctgacggcgatataccccatcagcaccgcaagcaggatagcccagccgccgaacacgccgcgcagcacgttgtgcaccataagccacacgctgccgcccggaatgagtacaaagcacgccgttaaaatggctgcaccgaaccagaggatagcttctgtctggttgcgctggcgcagctgctctacgctgggtgcgctctgttttgaagacgtgctcttcccttttgcggaagacgcacgcgattttgtattggacttagaacccgagctccgggtgtttttggcagccgatgacttcgcaccgctttttgctttggaagcgctgccctttgctgtactttgttttttacccgccaaaataaacctccggatttatagatcaccggatcaaagcggcatgccggtgaaaagatttgtgcccgtgaccgcttcgataacggaaacgatgagcgttataacgccgagcaccagcgtataataagcgaaaacctgcaatttgttcgtggtgacaatccacttgagcagcttgatggcgaggaagccgacaacagcagccgtaacaacacccgcgatcatcgcaccgacgccaatgtcgaccggctggccgattgcatctttaatggtgagcacagctgccgccaaaatggacgggatgccgagcacgaaggaataatcgagcgccgcctgctggttgatgccgcgcagaagacctgccgccatggtggagccggaacgggaaaggcccgggaacaccgccgccgcgcactgcgtgacaccgacgcaaatggcgtctgccgtgtggaactttgtgcggccgcgaatttcgccgactttaccatccttacgcgtaaagtgatgtacctttgcacccttggaagcacggatgccgaggaacagcagggcgcttgtcatgaggagcgcaaggccctcgatccaaatcgtcgaatccgaagcccacagctccgaaatatcttttaacttcatgcccgtgcccggaaccggcaggaacaaaaggaacagcgggataaggccgattatgagcatcatcaaaagtctgcggtcatgatccatatctttccatttaaatttgccgcggaatacgtctgcaacgagcgaaataaacgccttaatgagccgccagataagcttataatagacggcacatacggcgatgagcgtgccgaggtgcaaaagaatgtcaaacagcaagctgtctacctttacacccatgatgtgctgtgcaagcgacaagtgaccgctgcttgagacgggcagaaactctgttgcgccctgtacaataccttgaatgattgcttcaaaaatagacattatgtaatctccttttctgcggataatttggttttgttcggttttatcggtataattatacgataaataaaaagttatgtaaacggcaaatgccgtttttagagtgacttcttgccttttctgggctttgcacgctgcttattcttctctgcggcaatcattttgtcgaggcaatccatggcatcgtgcaggctgccgagcgtatcaataagcccctctgccacggcttcatcgccgtccagcaccgtccccacgtccatgacgagctcctgcgtattcatggcgagctgcataaagcgttcataggaaatgccggaatttgccgtgacgaaattcgtaatgcggtcctgcatgcgctgaaaatactccagcgtctgcggcacgccaagcatcaggccgctcatgcgcaccgggtgaatggtcatggatgccgagggcgcgatgaacgagtgctttgccgccaccgcaagcggcacgccgatggaatgtccgccgccgagaacgagtgacaccgtgggcttgcgcatgccggcgacaagctctgcaatggcaagaccggcctccacgtcgccgccgaccgtgtttaaaatcatgagcaggccgtcgatgttcgggtcctcctccacggagacgatctgcgggatcacgtgctcgtacttcgtcgttttgttctgcgacggtgcgacgtaatgcccttcaatctgtccgatgacggtgaggcactggatggtgtgctttcggtttttggtaacgaccgcgccgccctcgcggatctgcttctggcggttggaaaggtcttcgttttcttcttcggcttcgtccgtttcctgcatggaaaaagacgagcgtttctttgtgcttttcatgccgcagcgctccttttgaataagatgcgcttagttttcacagaaaatgcggaatcatacgcggcacaaactttcacgtatatcagtatagcacgcttttacgcatcctgcaagggcaaagcgcaaacatgtccgccgatgtcctgtaaatacatagtatgcatgttttgcagggtttaactgtatttcctgcaatttcatgcaatttattcacaatttacgattgacttttctcgcgaaatatccgataatgataaaaacagcgtcacattctccccccgtgacacggagcttcgcggtgcagccgcagaaaggtaaggctttgaaatgtccgattttacaaagatccccatgaaaacgccgcttgtggaaatggacggcgacgagatgacccgcgtcatctggaaaatgatcaaagatattttgctgaccccctatgttgacctaaaaacggagtattatgaccttggtctggagcaccgcgaggcgacgaaagatcaggttacgattgattccgccgaggcaacgaaaaaatacggtgtggctgtaaagtgtgcgaccattacgccaaacgccgcgcgtgtgaaggaatacaacctcacagagatgtggaaatcgccgaacggtaccatccgtgccattttggacggcacggtgttccgcacgccgattttgctgaagggcatcacgccgtacattccgacgtggacaaagccgattaccattgcgcgtcacgcgtacggcgatctgtataagaacgtcgagatgcgcgtgccggaaaatgcgaaggctgagcttgttgtgacaaaagcggacggcactgaggagcgcgtgaccatccacgaattcaaaacgccgggcgtgattcaaggtttacataatattgataagagcattgagagctttgcacgctcctgctttaattacgcgctgagcatgaagcaggacctgtggtttgcggcaaaagacacgatttcgaagacctacgaccaccgctttaaggatattttccagaaaatttacgacgcggaatataaagagaagtttgaaaaagtcggcattgaatacttctacacgctgatcgacgacgccattgcgcgcgtgattcgcagtgaaggcggctacatttgggcctgcaaaaactacgacggcgacgtgatgagcgacatgatcgcgacggcgtacggcagtcttgccatgatgacctccgtgctcgtctccccggacggcgtttacgaatatgaagccgcgcacggcacggtacagcgccactactacaaatatttgaagggcgaaacaacctccacaaactccgtcgcaacactgtttgcgtggacgggcgcgctgcgtaagcgcggcgagctggacgacctgccggagctgagcgcctttgcggacaagcttgaaaaggcaaccttgcagacgattgaagaggacggcatcatgaccggcgaccttgcggcgatgtctaccctgccgaatgcaaagaaagtggacaccgagggcttcctcttcgcgatccgcgatcgtttggagcaacttctgtaacccgacatggatttgaaaagcgtgggcggcctccctcctttttagggtctggccgtccgtttttcttttcttatttataaaaaacacttgcacaggtctttatgatgtgctaaaattttgtcaaacgaggtgatgatatgcagaagaaaccgtatatttccatgccggtcattcggcgtctgccgcgctactaccgctttttgcggcacttggacaagcgtggggtgacgcgtatttcctccaaggagctttccgaaaaaatgggcttcacggcttcgcaggtgcggcaggatttcaactgcttcggcggctacggccagcagggctacggctacggcgtgcaccaactttgcgaggagattggctctattttgggtgtggaccgtgcacacaagtgcattttaatcggtgcaggcaatttgggcaaggccattgcaacgcacatttcttataatttcgcgggatttgatctcatcggtatttttgacaacagcgaacaggttgtgggccagcagattgccgacctgcgcgtactccccgctgcgggcatccgccgcttctgctcggaaaacgcgcccttgatggcgattttgtgcgtgccggacagtgccgtgaaatcggtcgtggagctgctttatgacattggcatcaagagctactggaatttcagccactacgacattgccctgcgctatccggacacgatcgtggaaaacgtgcatctgaacgacagcatgatgacgctgtgctaccgcgtgaccgaaaacgaaaaaagttcttaaaagtcaaaaaatagctgttgacaattcagctgcatcatgctataataattgagccgtcaaacgagacggcaaaaagaatatgcaggtatggcggaattggcagacgcgtatggttcaggtccatatgaatgcaagttcatgcaggttcaagtcctgttacctgcaccaaaaagaccattgtcgaatgacaatggtcttttttcaacgaaattcgccttacggcgagtaaactaacaaccttcggttatcgtaaaattgcttcgcagtgagctgcgctgcgcgcgttaagagtgaagttcctttcactttctgcatacgcggaaaacttcacaaatacggcagcactcctttcacatttcgcaaagcgaaatatatcactaaccccaccgcccataaagacaaaatcttatctttgcgggcggcggggttttatcatctctcccccatcaccgcagccgtaacggctttagctaagcggttgacggcttcggtgatgcaggcgtcgggaatttcggagtagctgatgacgaatgcggtctgcgggtttacgggcgctgtatggtaatacgccgaaagcccggtgacgcgcacgccgttttccgccgcgcggcgggtgatcttttcggcgggcacaggtccgcagacacgcaggagaaaatgcagaccggcgtcttcggcatcaatttttgcaagctttaacaaaccgcagcgcttcatctcttttaagatgaggtcttttttttgcttataacggatgcgcatgcggttgatgtgcttttcaaaatagccctcggaaatgaattttgcgagcgtgtactgctcgaggttcgagaccgtgcacgcgtagaacccaagatttttgtaaaatgcttcggcgagcgctgcgggcagcaccatatagctgatgcggatggtgctggcaaggctttttgaaaacgtattcatgtaaatgacgcggtcggcggaatcgatgctttgcagcgccgggataggcttgccggtgaggcggaactcagaatcgtaatcgtcctcgatgatgtaacggttttcgctctgcgcggcccaatcgagaagcgtgtaacgccgtgcgatgggcgtgacgatgcccgtcgggaagtggtgcgacggcgaaatgtgcagaatatccgcgccgcttttttcgagcgctttggggtctatcccctctttatccatcggcgtgaaacggtactgcacgccatagctctcgtacacctgcgcaattttgcggtagccgggatcttcgagcgcgtagaccttatcgaaccccaaaagctggatgagaagcccgtagaggtactccgttccggcgccgacgacgatgcagttcgggtcggcatcgatgccgcgaaactccctaaggtgctcggcgatggcgcaccttagctcgaacacgccgccacacggggcgtttgccataagctcggcgcttttttccgagatgatctcgcgcatgagcttcgcccatgtggcaaacgggaaattctgcgggtcggtgcggctgctggaaaaatccgcaaaatatttcggcggtacgggcatttgtgtccggggactctcttttttctgcggcgcggtgcttttttccagattggcggcgaaaaagccttttttcggcaaggcgtagacgtacccctccgagacaagctgcgcataggcgttttcgaccgtgatgacgctgacgccgaggttttccgcaaagctgcgcttagagggcaattttgtaccgggcgtgatcttgcccgtcagaatgtcctcacggatgcacttatacaggtacatataaaggctttcggagccgatttttgagaaagaataggtgagcatgtaggttctccgtgatctgtcgcgttttaatttagtatagcggactcttgcacaaatgtcaaagccatggtatgatgaccttgaaacggaggggattgcatgccgaacgaagcgaagcttttatatgacgcgctcctatatgagaacgggcacctgcgccgcacacagcacattttaaaggtatacggccttgcgaaaatgctgggtgagttggaaaatcttcccgcccacgagcaggaaaatctgcgcgcggcggcgattttgcacgatatcgcgatcaaattttgcaaggaaaagtacgatgacggctgccccgcgaatcagcgcaaggaagcacctgcgttggcgcgaaaatttctgacggcctgcggttatgcggaagaagatctgccacgcatcaccaagatgattgttctgcaccactgctacgacaagatcgacggcaaggatctgcagcttctcgttgaagccgacctcattgcgggctgcacggaagaagatgatccttctgcccacgcaaaagccgtgcggcgactgtttaaatcctcttcgggtctcgccctgctcgacacgtttataaaagaataacgaataatttgacccgccgaggtgtatattccccggcgggtcttgctttatggtttgttcggtgcggcgcacggcgaccagtttagttctgcgtttgccacgcggcaatagcgtgtagtttgtgcatagccgccgtctcctgcgcagtcactgccgtctttgtttacagccgagacccaatagtgttcgccgtcaaagtaccattcgcgcagtgtgaggtcttcgttttgcagcgggactgcacccttttcccaaccgttatttatttcccctgcccatagtacgcgtttgcgccgtgcttgcgcaggtagtgcttatcgagaagctcctgctgcatgggcgagattgtggggtcaagcacgaggttgtgccatgccatgaacgcgagctcctcgaggacgacagcgttatgcacagcgttcatggggtctgtaccccatgtgaacgggccatggctgtggacgagcacggcggggatgtcgtccggggacttatccttaaacgtctcgatgatgacggtgccggtctccttttcataagcgccgccgatctcctcaggcgtcattttgcgcgtgcagggaatttcgccgtagaaataatcgccgtgcgtggtgccgagcgccgggatgccgcggccggactggctgaacacggtcgcccagcggctgtgcgtgtggacaacgccgccgatgttcgggaatgccttgtagagctcgacatgtgtgggcgtatcggacgacggattaaggtcgccctccacctttttgccggtgttcacgtcaacgagcaccatgtcctcggggcgcaggaggtcgtactccacgccgctcggcttaatggccatgataccgctttcgcggtcgatgccgctgacgttaccccacgtgaacgtgatgagcctgtatttcggcagcagcatatttgccttgtagacttcttctttcagtttttccagcatgatgttctcctcctgtatccggtcaaatgagtttataaagctttgcgccgtgcggctctattttagcggaaagcgtttttgtgaatgcggtcttctccccactccagatctcctctgcgtgcgttttatcggtgaattccgacagctcggcgctgacaacggcgtgcttttccgtgaggttgaaaagcgcgatatacggcgtgctgcctacgaaattgagccacgcggcttttgtttcgtcgcggaaaagctgcaaaggcgtggtgccgttttggttgaggtttaaaagctcgtcatttgtgagcaggctcagcgtgaacgcgtcattatcgcgcatttcgccgcccatgatgagcggcgagtggaaaatgccccacagcgtcatcatggtgatctgctcggcgtgtgtcaggttcgtattgtgccctatgccgtccgccgcgatggtgatatgcccgagcggcagcatatcgcagtccgggaactgaccgggctttacgtgcgcctgccagcgctcgcaccgccagaacatttctttgagggagtcccaattatcccagaaatcgtccgtgatgcgccacatgttcgcgtttttcgcaagatgccatgcttcttccagcacagccggaccgggcgaaaggctgagcaccatatcgcgcccgcagcggtcaatggcgcggcggatcatctcgatctcgcggcgcgcggaatacggctcgagcggagtgatcttcacgttgcagatgtcatcgaccttgacgtaatcgacgccccatgaagcgtagagctcaaagatagcgtcgtagtacgcttgtgcgccgtcacgatcagcgtcaacgccgtacatatcggtgttccacgcgcagatggagtttgcgtgagcgatgtcgcggcaagtgacgttcgtgccctttacaggcagggcgcgatgcacggcgagacgcggtacgccgcgcatgatgtggatgccgaattttagaccgagtgcgtgaatctggtcggcgatgggcttaaagcccgcgccgtttgcggcggaaggaaaacggttttccgccgggatgaggcggccgaatccgtccatgcacagctctgcaaaacggttatactcccagtggcgctgcccggcctccggctcgtaccactgaatgtcgcacacgacatactgccaaccgtgcgcttttaagtgctctgccatataacgcgcattgcccaaaagctgcacttcattgacggcggggccgtagcaatcccagctgttccagccaagcggcggctttaaagcgacgcgatcttttttgtaatgcatagtgtatcctccgtaggaaataggctcagtttcattatagcaacttgtctgcacaagtcaagagcaaaaaagagactgcgcaggttttgcacagtcccctttgacttcgtttgaattactttttaagcagctttttgaggcgctccatggcttcctgtgtcttttccagcgtaccgaacgcggtaaggcggaagaagccttcgccgtttttgccgaagccgctgcccggcgtgccgacgacctcggcttcgtttaagagataatcgaagaactccctggaggtcatgccgtccggcaccttgtgccagatgtacggggaattttcgccgccggtgaaccacacgcccatctctttgaacgcatcgaccatgaccttggcgttcgcacggtagtagttgatgacgtccttcacctgctgctggccttcgtccgtgaagacagcctcggcggcacgctgggtgatgtagttgacgccgttgaactttgtggcctgacggcgcgcccacagcgtattgaccttggtgccgtccgaaacaagttcatcgcagataacggtatagccgcagcgcacaccggtgaagcctgcggttttcgagaacgagcagaactcgatggcgcactttttcgcgccctcaatctcgaaaatgctgtgcgggagatcgtcatgcgtgatgaacgactcatatgcggcatcaaacaggatgacagcgttgtttttgagcgcgtaatcgacccacgctttgagctgtgctctgttatacacggcgccggtggggttattcggcgagcagagatagataatgtcggccttgacgttttcatccggcataccgaggaagccgttctgctcgtttgcgtcgaggtagatcacctttctgccggacatgacgttcgtatcgacatacacgggatagaccgggtccgggatgaggacggtgttatcgtctgcgaagatatcgacgatattgccgacgtcgctctttgcgccgtcgccgacgaaaatttcgctgagctttaatgccacgccgcgctttgcgtaatagccttgaatggcttcacgcaggaaatcatagccctgatccggcgaatagccgtggaatgtctccttgtgcgccatttcatccgttgctttgtgcatggcttcgatgacggccggaacgagcggctgagtgacatcgccgatgcccatgcggatgatgtggttatccggatgcgcctccgtataggcggcgactttctttgcgatggtcagaaacaaatagctttcctgaaggtttgcgtagttttggttgagtttcatgccggtttcttcccttctttttatacttggaccttttttattttcattaccgtctcttatgcgttcttttctctcttattgagtgatgcgccgacaaagccgaggaataacggatgcgccttattcgggcgggacttgaattccgggtggaactgcacgccgatgcagaagtcgttctgcggcacttccacggtctcgacgatcctgccgtccggcgaggtgccgctgatgaccatgcctgcttttgtgagtgtctctctgtaatcgttattgaactcatagcggtggcggtggcgttcatcgatatgggaaacgccgtagcagcgcgccatttgcgtgccctccgcgatctcgcacgggtagctgccgaggcgcagtgtgccgcccatattgatggtgctggactggtccggcatgaaatcgataaccttattgaggccgtactcgtcgaattcgccggagtttgcatccgcgatgccgcacacgtggcgggcatactcgatgacggcaatctgcataccgaggcaaatgccgaggtacgggacgttgctctctcttgcgtactgtgcggcatagatcataccctcgataccgcggttgccgaagccgcccggcacaaggataccatcgcagcccttgagcatttcggcagcgttttcctgcgtgatgagctcggaatcgatccaattgatttcgaccttcgtgccatgctcatagccggcatggttgagtgcttcgacgacggaaaggtatgcgtcatgcagtttgatatatttgccgacaaggccgatggtgacggtctttttgcggccgcggatcttctctaccatgcggctccactcggccatatccggctcttttgtcttgaggttcagctcgcggcagacaacgctggagaaattgtttttctccagcataatcggcgcttcgtacagcaccgggatcgtcatgttttcaataacacagtcgggctttacgttgcagaacagggcaatcttgtggaaaatgctcggatcgatcggctcatcgcagcgcaggacaatgatgtccggggagatgcccataccctgcatttcttttacggagtgctgggtcggtttcgacttatgttcgccggagcttttgaggtacggcacaagcgtgacatgaatgaaaagggagttttccttaccgacctcgagcgaaacctgacgaatagcttcgagaaacggctggctttcgatatcgcctgccgtgccgccgatctcagtgatgacgacgtctgcgttcgtcttgtggccgacgctgtaaatgaagttcttgatctcatccgtgatgtgcgggatgacctgaatggtctcgccaaggtactcgccgcggcgttccttgttgaggacgttccagtagaccttgccggtcgtgaggttggagaatttattcaggtcttcgtcgatgaagcgctcgtagtggccgaggtcaaggtcggtttctgcgccgtcctcggtcacgtaaacttcgccgtgctggtacgggctcatggtgcccgggtcaacgttgatgtacgggtcaagcttctgtgcggcgacctttaaccctctcgcctttaaaagacggccgagcgatgccgccgtgatgcccttaccgaggccggaaaccacgccgccggttacgaaaatgtactttgtcatagaacttacccctttcttttttacagtgaaacttttatatttttcttcgactgagaaacctattatttctccaataccctatttcattttatcaaagccgttttggcttttttacaattaaatttctacgatgccggtaaaaaccgtgtcggcgctgccggtcatctgcacgccgtcatcggtataattgatgacaaggtcgccgccgcgcagcttgacggtaatatcttcgccctttttgcagtagccgttgagacacgccgcgacggcagacgcacacgcgccggtgccgcacgccatggtttcgccgctgccgcgctcccacacgcgcatttttaaggtgtggttatccagcacctcgatgaattccgtattgatgcgctccgggaacttctcaaagtgctcaaaatgcgggccgatcttctcgaggtcgatcgtatcgggatctttgccgaaaatgacgcagtgcgggttgcccatggaaacgcaggtgacttcgtattctttgtcaaggacggtgatcttctctttgacggcagtatcacccgggaaatcgaccgggatcttcgcgggcacaagctccgctttgcccatatcgactgtgacagtggtaacttcgccgttttcgacatgcacgcggcagattttgatgccgctttttgtctcgatatacaaaacgtctttcttcgcgatgccgctgtcgtagacatactttgcaacgcagcggatgccgttgccgcacatcatgccctcactgccgtcgaggttatacatgcgcattctcgcgtcggccacatcggacggacaaatgtagatgacaccgtcgccgccgatgccggtgtggcggtcggaaagatagattgcgagctcggcgtagttttgaatatcattttggaagcagtcgatatacacgtaatcatttgcacagccgtgcattttggtaaacgtgatcttctgctttgccccggtgttcggcacgcgcatatagtggtcaatgcccgagccgttttccgtttttttcaggtacttgttcatggagtttcaccgctttctcttgaatttttaccttttatattctgcaattttttagaaaaaatttctgattttatttttaaaatgtttttcggcgctccgcaaaaatgcggaacgccgaactatttaacatcaattagacttctacgacaccgtcgaagaccttctctgcgccgccggtcatgagcactttctcatcggtgtagcgcacggtgaggtcgccgccctttaagatgacgcggatgtcctcgcctttttcgcacttgccgttgagcgttgccgcgacaacagccgcgcaagcacctgtaccgcaggccatcgtttcgccgctgccgcgctcccaaacacgtaccttaagggtgcgctcgtccacgacctcgatgaactcgacgttaacgcgctccgggaagagcgggttatactcgaacttcgggcccatggcattgagatccagcttatcgatggacggtgcgaacaccgcacagtgcgggttgcccatggatgcgcaggtgatgtaatactcgtgaccgtcgatgatgacaggcttgttgacgaccatgtcgccttcgagctttacgggcacctgctccgggcgaagcgctgccgcgcccatatcgaccgtaatcttgtacgccttgccgttcatcgtcatgatgctgcaagacttgatgccgctctttgtctcgatattgatgacaggctttttcacgatgccgttgtcgaagaggtactttgcgacgcagcggatgccgttgccgcacatgagaccctcgctgccgtcgcggttgaacatacgcatctgagcgtctgccacatcggacgggcagatgaggatgacaccgtcgccgccgacgccgttgtggcggtcggacaggtagatggagaggaactccggagaggaaacttcgttttcgaagcagttgatataaatgtagtcgttgctgcacgccgacattttggtgaacggcagcttgaccttttcttttttgaggttgttgatgtccacaatctccgtgttgtacggggtgtagcggctcatcaggctgtccgcgagggcgtttgcggtatcgatggccgtgaggcacgggatgccgagcagcgccgcttttctgcggatcttaacgctgtcgcgtgcggggtttctgccctttgcggaggtggagatgatgtacgccagcttaccgctttcgagcagtgtaatggtgttgaccgggctttcgtgaatcttatcgacaatcttcacggtgaggccgagctttgcaagcacgcttgcggtgcccgtcgtggcgtaaagcgggaagcccattttgtcgaatttcttcgcaatctcgccgatctctttcttatcgccgtcgcggacggtgatgaacacgccgccctttttgttcatcttgctgccggaggcgatgaggcccttatagagcgcctcctcaaggttgttgccgatgccgagcacttcgccggtggatttcatttccgggccaagctgggtatcgacatccgtgagcttctcgaaggagaagaccggcaccttgacggccgtatacggcgaagtcggatagaggcccgtgccgtagccgaggtcggtgagcttcatgccgaggctgacctttgtagcgaggtcgcacataggcacgcccgtgaccttgctgaggtacggaaccgttctcgaagcacgcgggttgacctcgatgacgtagatttcgcggttcatgatgatgtactgcaggttgatgaggccgatggccttgagctccgtgcagagtatttcggtcgtcttgacaatctttgcgctgagctcgtcatcgatgtcctttgccgggtagaccgcgatgctgtcgccggagtggatgccggtgcgctctacgtgctccatgatgcccgggatgaggatgttctcgccgtcgcagatggcgtcgacttcaatctcggtgccactgaggtacttatcgatgagcaccgggttatcctgcttctggcgcaggataatcgccatgtattcgttgatgtcttcatcgccgtatgcaatgatcatgttctgaccgccaagcacgtaggacggacgcatgagcaccggatagccgaggtcgtgtgcggctgcgagggcttcctccgtcgtcatgacggtgtgacccttcgggcgcttgatgttgcagcgctcgagcagttcttcaaagcgctctctgtcctctgcggcatcgatgctgtcggcgcttgtgccgatgatcggcacgttgtttttcgcaagcgtctttgtaagcttgatggccgtctggccgccgaacgcgacgacaacgcccttcggcttttcgatgttgatgatattcataacgtcttcggcgcacagcggctcaaagtagagtcggtctgcagtgtcgaagtctgtggaaacggtttccgggttgttgttgacgatgacgacttcatagccgaggcgctggagagactccacgcaatggacgctggcatagtcgaactcgataccctgaccgatacggatcgggccggaaccgaaaaccacgacggtctctttgccgcttttgccgatgaactccatcgcttcgttttcaccgccctgctccggcgtatcgtaggtgccgtagaagtacggtgtggttgcagcgaactcgcctgcgcaggtatcgaccattttgaaggtcgcttcgtgacggaaggtcggctttgtgccgcaaatacgcgtgagggcttcgtccgtgtagccgagttttttgccgcgcgtatactgtgcgtgcgtgagcggctgatccttaatctcgcgctcatacgcgagcaggttattgagcttttcgaggaaccacatgtcgatcatcgtgaagtcgtggatctctttggtggtgacgccgcgcttcatgagttcgtagatggcgaacaggcgctcgtccgtcgcgtcttttaaaatctgccacagggcactgtcctcgtagcttgcaaacttcggcatgttgagcgtatcgagcgagatttctgcaccgcgcacagccttcatgagggccatttcaaacgtatcggcgatggacatgacctcgccggtcgccttcatctgcgtgccgaggttgcgctttgcgtagacgaatttatcgaacggccacttcggaaacttgaccgccacatagtcgagcgcgggctcaaatgctgcgtaggtcttgccggtgacggcgttgacgatctcatcgagtgtgtagccgatggcaatcttcgtcgcgacctttgcgatcggatagccggtcgccttagatgccagtgcggaggaacgggacacacgcgggttgacctcgatgacggcgtactcaaaggacgtcgggtgcagcgcgaactggcagttgcagccgccctctacgccgagcgcgtcgatgatgttgatggccgcagtgcggagcatctgatattctttatcggaaagcgtgaccgccggggcgatgacgatgctgtcgccggtgtggacgccgaccgggtcgaagttttccatggagcagaccgtgatgatgttgcccttgctgtcgcgaataacctcgaactcgatctccttccagcccgcaatgctcttttcaacgaggatctgggtgatcggcgaaagcgcaaggccgtttgccgcgacctccatgagctcttcgcgattatcgacgataccgccgccggtgccgccgagcgtgaacgccgggcggatgataacggggtacgtgatctcttccgcaaactccagtgcatcctctaccgtggtgacaaccttggacgggatgcacggctgaccgatgctttccatcgtatccttgaacatctgacggtcttccgccttatcaatggtctccggggaagcgccgagcaggcgtacgttgtgttccttcaaaaagccttcctttgcaagctgcatggaaagcgtgaggccggtctggccgccgaagccggagaggatgctgtccggcttttctttttcgatgatgcgcttgatggtgggcagcgtaagcggctcgatataaatgtggtccgccatggcgttatccgtcatgatggtcgccgggttggagttgacgagcacgatctcgatgccgtccgctttcagagcacggcacgcctgagtgccggcgtagtcgaattccgccgcctgaccgatgacgatcgggccggagccgatgacgagaacctttttaatgtctttattcaatggcatagctgtaaacaatcctttctatactgctttgggtactgtttattttcccatcatctcaaagaatttatcaaagaggaacgcggtatcgcgcgggccgccgcaggcttccgggtggaactgcacggaaaaagcggggatttttttatagcgcacgccctcgcacgttctgtcgtttacgttgttgaaatattcgtcggcgatctcggggtcgattgtggaggacacgaccgcgtagccatggttctggctggagatgtagacgcggccggtctcaagattttgcaccggctggtttgtgccgcggtggccgtacttgagcttttcggtcttaaagccgtttgcaagcgccagcagctggtgaccgaggcagatgccgaagagcggtttgcccatgttcataatcttcttgaggttttcaatgacctcgatgttatccgccgggtcgccggggccgtttgaaagcatcacgccgtcaatattaagagctttcaattcgtctgccgtcgtgttgtacgggcatacaatgacctctgccccgcgcttttcgagctcgcggcggatgttctccttgtagccgtaatccatgagcgccacggtgcatgttttctccgggttctcacggcgcgtcatctcggtgacggaggtgctttccaccgcgtttgtcacgcggtagctgtgaattttatccatatcgacatgcgtaagctctgttgtgatcataccgttcatgacgccgctttcgcggatgacctttgtgagggcacgtgtatcgatgccgcaaaggccgatgacgcctctttctttaaaaaaggtgtcaagatcaccctccgagcggaaattggagggcgactgacaccattcttttacgatataaccacagggaccgatgatctttccctcaaaatcggaggggatcacgccgtaattgccgatgagcggaaatgtctggacgacaatctgcccgaaatagctcttatcggtgagcgtttcgagataacctgtcatgccggtcgtgaaaacgacctcagccgttacttcgcccgccgcgccgaaggattcgccgcagaagacctttccgttttcgagtaccaaatatgctttgttgcccataacgtacgttcctctttccctgaaataattactcttttctgctgtatgcaatctatgtcaaagctgcggtgcagccctgtacgcattcatttacgtataggttttcaggatattttccgcaacatcctttttcgatgtgcgcatatccatcgcctgtttttcaatatagcggtgcgcctgctgctcgctcatgcgcaggtattccacaaggatacactttgcacgcgccacaatgcgcacttcttccattttggttctgagcttctggttttcccggtcaaagcgctgccagcggttctgcgtggcgatgagcaggtgaagcgcctgataaaacagcggacgcgaaagcggcttttgcaccgtcaatatgccaaacggctccattttgtcgttcacctgatcgaaaatctccgcttttgcaatgaccatgacaccggaaacgaatttttctgtgatatactctgccagctcgtgcccgaattcatccgggagcggtgtgttgataaccacaaggtcgtagctgcgccgcaaaagcagccgccgggcgtctccgccgctgagcgccgttgtcatgggcgcaaactcgcgcggggaaagcagctctgtgatatacgccgcacctttttgcgtgccggacacgatgaggacgctgtgctgaatgatcgcattcatgccctgtgcccccttgttttacacatctgcgggcccgttgccgaacgtgcggatatacgtctttacgaaatactccgggaacacgttgcggacaaagctgctctttgcgaaaatttgcagcgcttcttcggcagactttggcagcttgccgcaggtctcgcgcgcaagatcgggctttggcagcttcgtctttttgaggtagccgtcaagccccgcataaatgagcgcagcgtacgcaaggtacggattcgcagtggaatcgggtgagcgcacctctattgtgatgctgccttcctttttatacgcaaagcaccagcggctcttctccgaccaagagatgaactccggcgcaccgaacgcaccgaggcgtttataggaatccgccgtagggttcaaaatggcggtaatctctgcagcgtgctccagaatacctgcaaggaaatactcggaacagtcgcccatctgcatgcgcggcgttagcgtgatgtggaagccgttgccgtccttacccggaatggggttcggcgcaaacgacgccgtaaggccgtttctcgacgccatggtcttcacaacagacttatacgtaataacatcgtctgcagactgaatggcagagctgtgctgaaaatcgatgatgttctgccccgggccgccgctgtggtgcgagctttccggtgtgacacccatatccccgagcgtcaggcagatctcgcggcgtacgtcctcgcccttatcctccggcgcggcatccataaagcccgcgttgtcaaaggggatagccgttgcattgccgttttcatcgttcttgaaaaggtagaattcatttcttgccccaaattcaaatattataccatgaagttttgcaatgtcaaccgcttttttcaggatgccgcggcagtcgatgtcgaaaccggtgccgtccgaacggcgaatgtcgcagaaaaaacgcacgacgcgcccgtgtgcgggccgccacggcagaagcgacatggtggaggtatccggcaccaaaaagagctcactgtccgcctctttttcaaagcccatgatgcgcgaagcatcaatgggaatgccgccctcgaacgcagaagccaaaaggctcggctgaatggcgatgatcttctgtctgccgaaaatatcgcagaacgccattttgatgaacttaacgtcgttatctgtgataaactctgtgacctcggactccgtatactgcatgccgaacccttcctttcttttttaaaagcgcgtttcaaacatacaaatatgcgtgaaatccggtgttgccgtctttcacgctgtacctgttcttcttttctgccgcattttgagatattctgccaaaatacagcgtatgctgaccgcttttgaatattataacacaaggtcggtgtattttgcaataagacagaacgcacaatgtttatcgccaaaatacaccgtcgatttatgcaagaaaagaaaccttaatttgcagagaattacagaggcaaaatcagttcgtcacatagagctgcttatacggattctgcgtgttcgggcgcagcacgtagtattcgtcgcgcagaagactttcggcatctgcaccgaacttttccgcgtagttttgaacgagcggcgccgcaatctgcatgtcttcttcggtcgccttatgcgccacgacctgctccggcaaatccttcggcaggtgcgcggtgcgcagataaatgcgtccgccgtgcatgcccgtgccgcagaaatttccgaccggctggcgatcttcactgccgatgccgagcacaacgatgatgccgcccgcctgatattcgccgaggaagctgcctgttctgccgccgatgacgagcacgggtactttctctttatattctttcatgtggatacctgcgcggtaaccggcatcgccctgcacgtagatggcaccgccgcgcatggcgtaacctgccgcgtcgcccgtgctgccgtgaatggtgatctcgcccgcgttcattgtgtcgccggtcgcgtcctgtgcgctgcaatttacaataatatttgcgccgtccagatacgcgccgagcgcgttgcccggcacttcgttcaatataatcgtaccctcactttgccctgcgccgatatagcgctggccgagtgcatatgttttctgttccatgtttctcccccttactgctgctttgagagcaggtcgcggcgcgtacgggccgtgaatgccatgagctgcggcttttcgcagatcagcttaaaatcgattgagcttaacggcgtgcgattacggatgagcgccgtgtagataccggcacgcgccacgtcgccaatcaggatatagccctttaaaacatcatctttatagaaaaggatcttgtagttttcaccgtcacggtggacgtaggtctcgccgtcatacgtgcctgcggtgatgatgtgcagccccatgaagccgatggcattcatcgggatcgcccggtcaaagctcgctttgccgcccgccatgttgatgccggcagtattgccctgcatataggcgttcggcaacagcgccagcacacggttcacgccggcggaaatatcgaagctctccgcgcagtcgcctgcggcgtagacatcgggcagtgttgttttgccggtatcatccgctgcaatgccgcggcgcacctcgccgcctgcatctttgacgagcgaagtattcgggcgcacgccgaccgcaatgacgagcacgtcaaaatcgaccgtaagaccgcttttgagtgtggcggtcgtgcccgcaaactttgcggcggtatcgccgaggtggaactcgatgccctgcttttcaagaaaatctttgacgatagcggagccggtctcatcgaggatgctcggcagcacgcggtcggcaaggtcgacgaccgtgatggatttcacgcgctccttaatgccctctgcacactttaaaccgatgaggcccgcgccgataatcaaaacacggctgtcttttgtaaggacgctttcaagcgcgtgtgcgtcatcgagcgacatgaacgtgaacttttcgggaacggtatcaagcccttccatgggcggtacgaacggcgtggagcctgttgcgacaaggagcttttcatagggtatctcttccccgctctttaacgttacggttttcttttccgggtcgagctttgtgacggtctcaccgagctttgcggtgacgtgattttcttcgtaaaagctgtccgggcggtatttcatgcgctcctcatccgttttgccctgcaataaataggaaatgagcgggcgcgcgtaggtgtggtggttttcggaagcaatcagcacgatctctccgtctttatctttactgcggatgccttccacacagccgatggccgcagtggagttgccgatgattacatattttgccatggtgctcagtccctttcctcaaagatgatggctttgttcggacagccctgcacacaggcgggcttaccgccggcgttttcgatacacagctcgcacttctgcatgacgccggattccgagggcatcagcgcgccgtagggacataccagcacgcaggtgtggcagccaacgcacttattctggtcgatacagaccacgccgtcctttttggaaagtgcgcccgcaatgcagcttttcacgcacagcgggtctgtgcagtggcggcaggaaaccgcaaagctgacctgattgtccccctcaatgcggatgcgggggtgaatggttctgtccttcagcgccttgatcatgctggattttccggagtttgcaaaggcgcagtaatattcgcaaagatggcagccgaggcaccatttttcatcaacatatactcttttcatggttacgctcccttttctgcttattcgcccgcgtgcttgatgccgagaatctgaagctctttttcgttcagacccacgccgcgcagcataaggcggttgccgcgcagcgcctcgatggaattgatgcccatgccgcccatcatttccttaatctcgtgctcccacgcggtgacaagattcacaaggcgcttgtagccgatgtccgggttaaggcgcttcacaaggtcggggcgctgggttgcgatgccccagttgcacttgccggtctggcagcttctgcacagatggcagccgagcgccaaaagtgccgccgtgccgatgtagcacgcatctgcaccgagcgcgatggccttgacaacatcggcgctggagcgaatggagccgccgacaacgagcgaaaccttgttgcggatgccttcgtcgcgcaggcgctgatcgaccgccgccagagcaagctcaatcgggataccgacgttatcgcggatgcgcgtaggcgccgcgcccgtgccgccgcggaaaccgtcgatggcgatgatgtccgcgccgctgcgtgcaatgccggacgcaatggctgcaacgttgtgcaccgccgcgattttgacgatgacgggctttttgtagtttgaggcttcttttaaggagaaaacaagctgacgcaggtcttcaatggagtaaatatcgtggtgcggtgcgggcgaaatagcatccgagccctccgggatcatacgcgtgcgggaaacgtcgccgacaatttttgcacccggcagatggccgccgatgcccggctttgcgccctgtcccattttgatctcgatggcggcgccggcgctgaggtaatccttatgcacgccgaagcggccggacgcaacctgcacgatggtgtttgcaccgtacttgtagaaatcctgatgcaggccgccctcgccggtgttgtagtagatgccgagcgcttctgcggcgcgggcaaggctttcgtgcgcattgtagctgatggagccgtaggacatggcagagaacatgatcggcacggaaagctcaagctgcggggtgatattcgtcttaatcttaccgttctcgtcgcgctcgattttagacggcttctgacctaaaaacgtcttcgtttccatcggctcacggagcgggtcgatggacgggttcgtgacctgcgacgcgttgatgaggattttatcccagtagaccggcaggggcttcgggttgcccatggaagacagcagcacaccgccgctgctcgcctgacggtagacctccatgatggtctcgccggaccagttggcattttccttaaaggtgtggtcggtcttgacgatcttcaatgcgcgcgtgggacagatggaaacgcagcggtggcagttcacacagcggctttcgtcggagatcatcattttcagctcatcgtcgtaagcatgtacttcgttggagcactgtcgttcacaggcacggcaggcaatgcagcgcgcggggttgcgaacaacctcgtactgcggatataaaaaatcgatagccatttatagtaacctcatttctcagagaacacaaactcttactttttgtccagcgtgaagatgacaggctcgccgcctgcgggcgcccagaccttatcgagcgtgggctgaatgacgcggatggcagattcttcactggcgatgtagaccatatcgtccttttcgccgacgaccatagagcgcagctttaagcggtcgttgagtgccataaggccacccgtaaagccgaccagaatggagaacggaccggtgacaagcaggccggaatacacattgcgcaaatacgtcagacgctcgcgctcctccggatctttgttctgaatggtcgtccagaacggtgccgcgatgacgtttgcgacctcttgcagggtgaggccctgacggcgtacaagataatcaaaaatataggtgatgacctcggtatcggtcaaaaggttgcagttgtagccgtacatctcaatgcagcggcggttcgcatcgtaggacgagatttcgccgttatggacaacggaaaggtcgagcagcgcaaacgggtgcgcaccgccccaccagccgggggtattcgtcgggtagcggccgtgcgccgtccaacagtagccggcgtattcatcgagacgatagaaccgaccgacatcctccgggtagccgacggccttaaacacgcccatgtttttgccgctggagaaaatatacgcgccatcgataaaggtattgacgcggttgacgcagcgggcggtgaactcgtcttcatcgagctggctttccgcaagctttgtgtgcagcggtgtgacgaagtaccgccagataagcggctcgtccgtgatctgcggaatcttgcggatcggaattttggaaaggttcacgacatcgaaatgctcgttgatgaacttctcacattcctcttttgcttttacattattatagaaaacgtggaacgcatactgttccgcatattccgggtaaatgccgtagccggcgaagccgccgccaaggccgtttgaacggtcgtgcatgatctcaatggagcggatgatatcggagccgtccagccgctttccgctgcgggaaaaaacggaggatacggcgcaccccgaaggaattcggaaatcgcccgctgtgcttttgccttctctaagcatgaagactgctcccttctgaaaacaaataagatatacgtctttttcccggcttttccgaaaaaaagagaaagtctgaccatacatgctgcgtgcaatgcacgcgcgccgttcccccggcgcaatctaaaagccccacattcggcagcttttaaaagcaacatgtatgatcagactccattgtctgcctaccattatatagcggcccttcttatatgtcaagaaaaattttgcgatttttgaatttttgagttgtagcaatttcattttatgttcgcttgactttaaaaatttcataaaatgaatttataaacgcaggtttaaattgtacatcctgcaaatcttcaaatttcctcaaaaaaggtgttgacaaatggcccgagacgttgtaaaattcatcacatagcatagcaaaggcgctgtggttggtttattgccatccccagcgcttttttgtttgaatgaattacgaacagctgtgcagacggtttcgtaaagcgaagccgcaggacgaaacgcacgggaagatatacaaattatatcgcagcgttcgtccctcctattatgcgaatcttattgaaggaaagagtggtttacatgagcagcacgacaaagatcaatgtgccggacattttcgccagcatggtgtttaacgacgacgtcatgcgcgagagactgccgaaggacgtttacaagtctttgagaaagaccatcgacaacggcaaggacctcgacatcacggttgccaatgctgtggcaaatgccatgaaggactgggcgattgaaaaaggtgcaacgcactacacgcactggttccagccgatgaccggcatcaccgccgagaagcacgacagcttcatttctccgacggcagacggccgcatcatcatggaattctccggcaaagagctcatcaagggcgagccggatgcttcctccttcccttccggcggtctgcgcgcaacgtttgaagcccgcggctacaccgcatgggacccgacctcctacgcattcattaaagatcactccctgttcattcctacggcgttctgttcctacggcggcgaggtgctggataagaaaaccccgctgctgcgctccatggaagtgttgagcgcacaggccgttcgtattctccgccttttcggtgactccacaacaaagcgtgtcatcacgaccgtcggtccggagcaggaatatttccttgtcgataaaaagctctacgatgagcgcccggacctcatttacacgggtcgcacgctgttcggtgcacgcgcaccgaagggccaggagcttgaagatcattacttcggcgcaatcaagccgagaattgccgcgttcatgcaggagctcgacgaagagctgtggaagctcggcgtgcttgctaagacaaagcacaacgaggttgccccggcacagcacgagttggcgccgatcttctccactacaaacgttgcgaccgaccataaccagctgaccatggagacgatgaagaacgttgcgctccgccacggccttgtctgcctgctgcatgaaaagccgtttgcaggcgtgaacggctccggcaagcacaacaactggtctatttccaccgataccggaaagaacctgttggagccgggcaagctgccgcaggaaaacgcacagttcctcctcttcctcgctgctgtcatcaagggtgttgacgagtatcaggatctgctccgtatctccgtcgcttccgcaggcaacgaccaccgcctcggcgcaaacgaagcgccgccggccatcatctccatcttcctcggcgacgagcttacggctattctgcacgccattgagaccggcacggtctatggcggtacgctccgcgtcaacatggagattggcgtaaacgttctgccgtccttcacaaaggatacaacggacagaaacagaacctccccgttcgctttcaccggtaacaagttcgagttcagaagcctcggctcgcagctcaacatcgcctgcccgaacatcatgctgaacacgatcatcgccgatgagctcgagcagtttgcagacgagcttgagggcaaggaagattttaacggcgcactcaacgcactcatcaagcgcgtgatcaaagagcacaagcgcatcatcttcaacggcgacggctatgcggacgcatggaaggcggaagctgcaaaacgcggcctgacgaacctgccgaccacggtagacgcactgccgcactacaccgacgaaaagaacgtgaagctctttacaaagcataagatctacaccgaggtcgagatgcagtccagacaggacatcatcctcgagacgtacgcgaagaccatcaacattgaagcgctcaccgcaagtgatatggtcaagcgcgacattctccccgctgtttcctcttacgttgcggagcttgcaagcggcgttgccacgaagaaggccatcagcgatgacattccgtgcgaagcggagcttgatatcatcaagcgtctttccggcctgcaggactgcgcatataagaagcttgctgcgctcgataacgccatcatcggcgtgaaggaagtcggcgaagatccgattgaggttgcgacctattataaggattccgtcatcaccgccatgaccgagctgagagccgttgtggacgagatggaaacgctggtctcttccgattactggccgtacccaagctacggcgatctgatgttcagagtataaggggctttgaacataccgtttcaaacggacaagggatgaaaaattccatataggcacaagggtgtgcacggggttccgcttttgggaccaaacgtgcacacccttttctattttcaaatcactagggcttaaacttaggaggacgaatatatgacaaacgagatcttcagcgtctggtttttgatgggcgcggcgctggtcttctggatgcaggccggcttcgccatggtagaaacgggtttcacccgtgcaaaaaatgccggcaacattttgatgaaaaacctgatggacttctgcatcggcaccggcgtattcatcctcatcggcttcagctttttgctgggcgaagacttactgggcttcatcggtaagccgggctttgatattttcacaaactacgcaaactttgactggtcgaatttcgtattcaaccttgtgttctgcgccacgaccgcgaccatcgtttccggcgcaatggcagaacgcacaaagttcctttcctactgcatttactccggtgttatctccgctttggtataccccatcgaagcgcactggatctggggcggtggctggctttcgcagctcggcttccatgattttgcaggctcctgcgccatccacatggtaggcggtctttccgcgctcatcggcgcaaagctgctcggcccgcgcatcggcaagttcgaaaaggatgcaagcggcaagatcgtaaaggtcaatgctttcccgggccacaacattccactcggctgccttggcgtgttcattctttggttcggctggtacggcttcaacggtgctgcggcaacaagcgttgagcagctcggctccatcttcctcaccaccaccgtctcacctgccatagcaaccgtcacctgcatgatcttcacatgggtaaagtacggcaagccggatgtttccatgtgtctcaacgcttctctcgccggtctggtcgccatcaccgccggctgtgacgtaacggactgcctcggcgcgacaatcatcggcattgtggccggtctcctttgcccgttcggcgtttggctgctcgactataagctccatgtcgatgacccggtcggcgcggttgccgtccacttctgcaacggcatttggggcaccattgcagtcggtctttttgcaacgaccacagcccccggcaacgataacttcaccggcctgttctacggcggcggcattgcactgcttgcaaagcaattgcttggtgtgcttacggtctgcgcttggacagccgtgacgattaccattgtgttcctgctcatccgcgcgacggtcggcctgcgtgtgacgagagaagaagagattatgggtcttgacctgcccgaacatggccttgcaaatgcgtatgcagacttcgttccggccatcaacacctcgctcgaaagcgcagacctcagcgttgcccccgccccgttcggcccggctgcggtggacgaagcagtgccggtcgttgtgcatcacgcccccgtgaagaccgaaaaagcggaaagcaccggcgtgaagatgacgaaggtcgagatagtgtgcaagcaggcagctttcgataccttgaagaacgcactgatgagcgtcggtattaccggtatgacggtgacgaacgtactcggctgcggcattcagaagggcaagccagaatactaccgcggcacgctcgtagaagcaaacctgctgcctaaggtacaggtggaggtcgtcatttccagggtgcctgtccgcacggtcatcgaaacggcgaagaaagcgctttacaccggtcacatcggtgacggcaaaatcttcgtttacgacgtggagaatgtcatcaaagtccgtacaggcgaagaaggttacgacgccctgcaggatgtggaataataaatcttcccatttaaattgagtacgacgcgtactacgctcctgaaataagaaaagccgagacctgccggttccccccggcgggtcttgactttttctgtcattttctcctgcaacttattttcggttttgcacaaaatgggaattgaactctttttggatttgtgttatactgttataagaatttatccaccccgattgtgagaggagacagccgtgaaaattcaggaatccgcagaaaactatcttgagaccattttgatcttatccgagcgcagcacctatgtgcgttctattgatattgccaacgagctcaattttacaaaacccagtgtcagcgtagccatgaaaaagctgcgcgagaacaatttgatcaccgtagacggcgacggctacattcatctgacggaggacggccttgccatcgccaaccgcatgtatgagcgccacaagttgctttccgattggctcacctatctcggcgtgccgaaggacattgcaacagaggacgcctgccgcattgagcacgtcatcagccaggagagctttgaaaagatccgcgcgcatgtccgcgaaatgaacgagcatctttaatgaacttaaacagcacaaaacccgtttccgaagcttttatcggaaacgggtttttacttttacagcaacgccatgctctgcaaaataaagatcatcaaaaatacggtcgggatgcagcacacggcgctcaaaacaacaagctgaccggcaagctcgccatctgcgcccgcctgctgcgccatgatgtagcttgataccgcgaccggcgtttcccacgcaagtgcaagcgccagaagactcggccctctgctgcccgccagaaccgcaatcggcagaaaaacaagcggaatgacgacgagctttataaacaccgtcacgcccgcaatacgcatgttgccttttagcttgcggaagctgaaatcaccgccgagcacgatgagcgcgagcggtgtggcaaggcgcgaaacatcgcgcaggctcgtttccagaaatgccgggaaacgcaatttaatgatggacgcaaaaacaccgagcagtgccgcgataatgagcgggtttgtcgcgatggatttgagcgtctttttcagcgagacctttcctccgcccgtaaataccgtcagcgcaatgacggccaaaacgttgtacatcggcacgagcacggcgctcaagatggatgccgcggcagcctcctccgcgccgaacacgttcgtgacgaggctcacgccgaatatgacgtagttgctgcgaaaaagtccctgaatgacgacgccgcgctgtttcggctcgcgcacgacacgcggcacgacgatgcacagcactgcgaacaataacagcaggctccctaccgcgattgtgaacgtcatgccgtcgatggcctcggtgatctccgttttatagatgttattaaacagcagaaacggcagaaaaaatttgaatgtcagcgtattcgtctgctttaaaaattccgacgagacgaagtttttgtgctttaaaaagtagccgaacgccaaaagcaaaaacgtcggcatgatcgcattcagcgcgaccagaaaactatcgaacacgctgcaccccggctttcacactttcatgcaccgccataattttctggaagcccgcgatgccgacggaaaacgccgttgcgccgcccgccgccgtgcccatggcgagcgcctttgcaaaatcgccggaacgcgtgaattccgccaaaaagccaccgaccatggaatcgcccgcgccggtagagtttagcagcgtgccctttgccgccggggcaaaatacacctcgcccgtttccgtatacaaaagcgcaccgtcgcccgccatggaaacgagcacgttttttgcaccgcgtttttttagctcctccgcaagcgccgtcacctgttcctctgtgtccgccggggcacggaacatctcggaaagctcctcgcggttcggctttacgaggaacggctgaaattcaagcgtagacaataataaatcgcttgcggcatccacaatgagccgtacgccttttgtttgcgcaagctttgcaatctgtgcgtaaatgtcttttggcagtgacttcggcacactgccggaaagcaccaaggtatcctgcggggtcaaggcaccgagcttttcaaaaaaacttttgagctcgttttctgaaatctccggaccgctgccgttcagttccgtttcttcctcggcatgcagctttaaattgatgcgcgtaaagccgttttcgacttcgatgaaatcggtcgtgatgccttctttttcaacgccctcgcgcagcgctttgcccgtaaagcctgcaataaacccaagcgcgatgctttttgtattcaacgcgtgcagcagcaaagagacgttcacgcccttgccgccaaacacaatgttttccgttttcgtgcggttcgttttgcccgtgcggaacgtatccgccgtgacgacataatccaccgccggattagatgtgatcgtgtagatcataaaatcccctccaaccaaatcaagtggtttcagcatagcatgattttacaaaaaaagcaagaaaaagcgtctgcaccgccaaaagacgtatgcagacgctcattttattttgatttaggcttctaagcgctcaaattttttcgcgccccaacgcaccaaaagcaggtgcatcaagacagacgcaagcaaaaggaacgcagtcgttaccgcatacgctgcaatgcccggaatatgcagtgcagataccgcgaaaaacacgccgacgatcactgccgcaaagaagtacgcgccgaacattgtgacgcatacgctgagggactgcttgcacggctggttttcgctctgccaatcaaagcgcggcgcgagcaggttcatcacaaggccgagcgcgccgacgaaccagcagaacaaaacgcaaacgcaaacggtcaacaccgtgagcccgataccgcacccgacgatgaggcaaagcgccaaagcactgacggcgacaagcggcatttgcaggcggcacaccataaggagcttgcccaaaagcaccgttttgccgcttatgggcatcgtgcgcagcacccacagatttttgccctccagcgagatagacggcgcggtcgcacaggacgtcgcgatgcaaaacgccatcactccaaaaatgccgagcgcaatccactcgggccgaaagcccatcaggcttatcatctgcatcagcttcccacggaaaatcgcggcggcaatcggcagaaccggaatgaccaccaagccgaagccgaaattcatcaggtacgcggggcttgtgaagaacttccgccgttccttatgcgcaacagacagcaccggcgtgcgctgttttacggaagccttacccgatttgtgctttgcacccgctttcgcgcccgatgtattcacggaggaaatgaaagatgcggaaagccgccaaagcgtgaaaagcgctattgccgcgctcaataaagtcacgagcagcgtgtgcaaaaggcttccgccgcacgccatgccgacggcataaagcggccaaacgtatttcatcgcacccgcgatctgcgtgccctgcatgacgatcccggacaaaaccgagttgacgttcgcataaaaataccaatacaccgccatgaaaacgaccatgtacaaaagcgaaacaaccgccttgttgcgcaggcggctgaggagcttgtgcagcacccagccgagcgcacagcagacagactgcgaaatcaggctcagagccacaaacgtaaacagccacccgataatcatcgtcgccgatgcaccgtaggaaaacgcgtaaataccgaacgcgggcagcaaaaccgccagcgtgtaccctgccgtcgttgtgaacagcattgcaatgcgcgtcaagagaatgtactttggcggtatcggcatggaaagcaaccgttcgttgtctttcgcgtcatacaactgcgcctgcgtcataaaaacgctgcccagcatggaaagcgccagcgccattgtgcccgccatggcgaaatacagccatgtaagccccattccgcacaacggaacaagctctgcgaacaccacaaacatccaaatttccatgcataccacaaggaacagcatcagaaaaaccagccatccgccggaggtctttttgccgttgccttttttcatgcgcgccgcaaactgcttccattgcagcttccagagagactttaacataccgactccccctttcagtccttgtggtcttccagctctaagaagacctgctccaaagaaccgtcgccgcgcacgctgtccatggtgccgtgtgcaatgagcttgccgtttttaataatggccacattgtcgcacagcttctccgccacttccaaaacgtgtgtggaaaagaagatagcgccgccgtttcggcaatgctccgccataatctcctttaattcgtgcgccgcaatggggtcgagcccgacgaacggctcgtccatcaaaatgagcttcggctcgtggataaacgcgccgataacggcgattttctgcttcatgccgtgcgagcactccgagatgaggttcggcagcgcgtttttaatatccagccgctcggcaagcgcttccatgcgcgccttgcggtccgcttccgatacgccgtacatatccgcaacaaaattcaaatactcgtagcccgtcaggaattcataaagatcaggattatcgggtatgtaggccatgatctttttgcaggcgatggggtctttttgaatatcgatgccgttcaccgtaatggtgccgccgtccggctttaataagccgcagcaggcttttagcgtagtcgttttgcccgcgccgttgtgtccgatgaacgcgcagatctcccccgccgcaatgtgcagcgaaaggttgtctacggcgattttgtcaccgaagcgctttgtgtagttttgaatgtccagcatgtgtttttctccttttccttcttttcacggctgaaatgcggcctttccgaatttcagccgccgagcccattatagacacacggcagaaaaatgtcaatgttttccgtcgcatggaaatatgtcataaaagaacataaaaacagcgcaactcctacgagctgcgccgaagcaagtcgaattattcttttcctgcagagagcgccgcttcctgctttctgcggcaaccaaacacgagctgatcgataacgacgacgagcgcgccgagcagcacgatgatgtaatatgtgaagaatcgccagacaagcacggcggtgtacaaaatatcgccggatgcaaaatacgatttaaagaacatggagaagccgagttcctgtgcgccggatgcaccgggcagcgggataaagcacacggaggcctgcagcatcgtctgcatacaaagcagttcgccgtaaggcaggtcgagtgaaaacgcgcggaacaccacgtacagcacgctcatctgcaaaatgacctgcgggatcgaccacaaaattgcaaggagcacatagcgcattttgcttctgaatttcatcgtgtaggaggagaaatccgcctcaaagccgtgcactttctccatgtaattttcgcgctttttgagaaacgtacatttcaagagcagctttgtcacgccgccgcacagcttttttaagatcttcgggctaaacagaagcggtatcgcgataatccacagcccgttgatggcgatgccgagcagcacaatgggaatgagctgcgggtcgtcccgcttcaaacgcgggtacatataaatcagcgatgccaccgtgcacagcacaaacgcaagctgatacgcaaaaaactttacaaacagcaccgcagtggagttgccgaccgagaccttatcgcgccgcaggtagacgacctgcgcaggctgcccgcctgtggagctcggcgtgatgtaagaataataaatgccgatgaacccaatcttcaccgttgtccaaaagccgacgtgctcgccctgcgcgcgcagcagcatatggatgatgccgccctctgttacgaggaacacgccggtcatcagcacggcgagcgccacaaacccgagggaaagatttgcgatgacggaaaacatgcccgcaaattcggtattgacgagcccgaacacgatcatcacaaccaccgtcagccccacgtatataagaccccacgggatctttttcttttctttcatgaaaatgtagtctccttgcagaaaaatcgtattttatagtataccatatagcgtttctattggcaagacaagactgacaaccgaaagaaaacgttaaggcagtgccctgaatattcggcactgccttattcgtttattttacttttccccgtgcgcatcccagataattttcaggccgtccagcagaagcgtatcgctgaaagtaatcttgcggctgcaatgcggtacgataagccctgcgaggccgcccgttgcgaccacctcgcacggtgcgccgagctcatcttcaatgcggtcgcacaggccgtccagcatacacgccgtgccgaacaccatgccggactggatgcactccatcgtgttgcggccaagcacctgcggcggcgcggtcagactgacggaagaaagctgcgctgcgcggctcgtcaatgcgtcaagggacgtgccgacgcccggaatgatcactacgccgcacacttcgccgtcggcgtttaaacctgtcagcgtcgttgccgtacccatatcgatgacgatacacgggccgtggtacatggcttttgccgccacagcaccgacaacgaggtcggcgccgagtgtgttcggcacatcgcgcttcactttcagctccggcacagactgcgcgctgacgataaacggttccaccttccaaacacggcgcaccgcgcgggcgaggtcatcggtcagccgcggcacaacggagcttaaaaccgcgccgttcacctgcgacgtgtggatattgtataaatgtaaaatgctgagcattgcagaagcgtattcgtcctccatacgcggcggattcgtcgccatgcgcgtgacgaacagcagcttttccccctcataaacgcccagtgtgatgttggtatttccgacgtccagtgccagcagcatacctttcccctccgaaaacaaatttctttgagagcagtatatcacaaaaacacaaaaacgtacagaaaaagttttacccaaaaagccgcaccgaaagcagcgtgagcagcacggcggcaaggtcgccgcaaagcgccgccggaatcgtgtagcgcagcgttttatacccccgacccgaaaaatataccgcggccgcgtaaaatgtcgtttccgtcgaagacgataaaattgccgccaatcgggatattacactgtccgcaccgtatgcgctgtaaagctccgtaacatatgacaccgagccgctgcccgaaagcgggcgcagtaagatgagcggcataagctccgtggggatgttcagcacttctgtcacgggccgcagcagcgcggaaaacagctctaaaaagccggacgcgcgcagcatggaaatgccgacaataagtccgagcagtgtcggcaataattttatcgccgtatgcatgccctccgccgcgccttttgtgaacagctcaaataccggcagtccttttacgtacccgcacatgaccgtgagcgcgatcacgccgcagacagccgccgcgcctatgcccgccacaatttttgaaacacgcggcacatcagcacgcagacgagcaggctgccgaatgaaacaagccaaatatgcggcataacagcatacgggtccgcgctgccgtaggaagcccttaaggtgaccgccgccgaggggatcagctgaaacgacgccgtattcatcacgacgaataagatcatctcttgcgtcggcgcgtcgcccgtctgtaatttctgcatttcgtccatggcgctcaatccaaacggtgtggcggcgttgcccatgccgagcatgtttgcggcaatattcatcgatattttttcgcgcacggtttcattttttccgtaattcggaaacagtcgcttgatgaccggtgacagaattttggaaagcccgtttgtaagccccgcctctcccgcaatacgcatgatgcccgtccaaaggcacatcgcgccgagcagcaaaagcaccgtctccaccgcctgccttgcgccatccgccgccgcagcggaaagtgccgtccatctccccgtgcacaccgcaccgacgaacgccagcacaatcatcgccatccagatgccgttcagcatcctaccctcccctttcattttatttctctgcggaaatttacagagttttgattgattttaacacaaatatggattatgatagaggtatattcatttggaaaggatgaaatgtatcatgttcggtgaaaaaattctcgattactgggacgatataatgaaagacctcggcgatatcatcgccattccctcagtcgcacagccgcaggacggcccgtatccgttcggcaaggacgcagcaaccgctgtggataaggcgatagaaattgcggaacgatacggcattaagacgaagaacagcgactattatgcaatgcacgcagagctcggcgagggcgaagaaaacgccgttgttatggcgcaccttgacgtcgtgccggccggcgaaggctgggacagcgacccgtacaccatggtcatccgcgacggcaaggcattcggccgcggcgtttccgataacaagggtccggcaattgttgcgctgcactgcctgcgcgcgctgaaggaagcaggcgtcgtcggcaaacgcaagctgcgcgtcgtgctcggctccgcagaggagatcggcatgcaggatatgggtcactacttctccaaagagcagatgcccaccatgggcttcaccccggacgcctgctacggcgtgtgccactgcgaaaaaggcctgttccgctttgccgtaaccggcaaggtcggcaagaagatcgtttccttcaaggccggtactgttgtcaacgccgtgccgtacaaggcagaagccgacgtgctctgtgatgacgacgaatttgcaaagcttgtcgaagctgcaaacgctgcggaagtgaagttcgacatcacacgcaccgaaaacggcgcacacatcatcgcaaacggcaaggctgcgcacgcttctaccccggagatcggcatcaacgccgccgcgcaccttgcacacctgctcgtgaacgtcttcggtgcagactgcggtgaattcctcacgttcatggatgagaaagtcggccttgcatatgacggctccaacatcggcgttaagatgtccgatgagccgagcggtgcgctgaccttcaacctcggccttgtgaacatcgaaaacggcgagggccgcttcgatatcgacattcgctacccggcaacaaagtccggcgcagagattgacaagatccttgcaaagtccgtggagggcacaggcctcacctacacgctcatttccgatgagccgccgctgtacctgccgaaggacggcccgctcgtcagcctgctttccggcgcttatgaggacgtcaccggcaaaaagtgcgacgtcttctccatgggtggcggcacgtatgcccgccagatgggcggcgcaggcgttgcgttcggcgcatcgttcgacgaagaggaatcgaacgcgcaccaggcaaacgagtgcatcaatctggagcagttcaagctgcacgcacaaatctgccttgaagccatgtaccgcatgtttacagcggactgattttgaattcaggagcgcaccgttatggaatatgcacatatcatgccggaggacatttttaaaaatcccgaagtgaaggtctacgtggaggcgggcaacagctgccttggcgcactgggcttcacggagcacggccgcccgcacgccaagcggtgcagcaactacgcgcggaacattctggaagcgcttgattacgatacgcgcacctgcgagcttgccgccatcgccggttatctgcacgatatcggcaacacggtaaaccgcgtcgaccacgcgcacagcggcgccattatggcgttcacgcttttaacgcgcatgaacatgccgccggaagaaatcgctatcatctgctcggctatcggtcaccacgatgagaaaaccgctttcccggtaaacgccgtctctgccgcgctgatcctctccgataaaagcgacgtgcgtcgttcccgcgtgcgcaaaaacgcgattatcgcaacggatattcacgaccgcgtgaattacgccgtcgtgaacgcctcgctgaaaattgacaaagagcagaagctttgccttttcaacatcacgattgatacggacatctgccccgtcatggagtatttcgagattttcctcgaccgtatggtgctgtgcagaaaagccgccgatcttttggggctcacgttcgagcttatcatcaacgacacgcgcctactgtaatccccccgcaaaacccaaaatataaaaatcgaaggagccgcgcccgctttcgggtacggctccttcttcattttcactccatgagcgtttgcttataaaattaacttttccgaaagcttacatcgtgccgaagatacggtcgcctgcgtcgccgaggcccggcagaatgtaaccgtgttcgttgagcttctcatcaacggctgcacagtaaatatgcacgtccgggtgcgcttcgctcagtgccttgaggccctccggcgctgcaatgatgcacaggaacttgatactgcgcgggcggctgcgctttacaatggtgattgcgtccattgcggaaccgccggtcgcgagcatcgggtcaagcacgatgacatcacgctcttcaatgtcggacggcagcttgttgtagtattcgaccggctgcaaggtatcgtggtcacggtaaagaccgatatggccgacctttgcgctcggaacgagctgcagcatgccgtctaccatgccgagaccggcgcgcagaatcggcacgaacgccagctttctgccggcgatgaccttcgtcgttgcggtgcacatcggggtctccgtctgcacgtccatcagcggcaggtcacgggtagcttcgtagcacatcagcgttgcgatctcgctgacaagctcgcgaaattcctttgtgccggtgttcttatcgcgcaggaaagaaagcttgtgctgaatgagcgggtggttcatgataaaaatctgttcgttgttttccatattgatttctccgatttctgccttacaggcgtccgttttcaatatctgcgatctggtcgatacggcgctggtggcggccgccctcaaagtcaaacttgaggaacgtgtccacgatttccagcgcggtcttctcctcggtgacaaggccgccgagacacagaatgtttgcattgttgtggcggcgggtcatttccgctgcgtgggtatcgctgcacagtgccgcgcggatgcccttcactttgtttgcggccatggaaataccgatgcccgtggagcaaacaagtacgccgtaatcagccttgccgtctgccacgcagtgcgcgacttttgcgccgtacaccgcatagtccacgctctccatggaatagcagccgaaatcttcgacttcgatgccctttgcttccaaatgcttcttgacggcttctttcagagcgaatccgccgtgatccgaaccaactgcgatcttcatgctttattctccttcgtatatggattacttattgtttttctgtgcgtttttggctttcagttcgcgctccgcctgcggcagacgcaggtagattggcatcaaagcgtccggcgtgaccgtctgtccgttttcaaccatctcctgcgccgccatggcaacgccggaggcacgctgaaagcgaagctgcggcagcagaagctctgcacggatagccgcaaacgtcttatagcaaagctccgcgccatcgccgacaagataaatcttctccgtaaacgttttgcattcttccaaaagctccgcaatgggcagtgcgcggtcatcacaaagacgtgtgagcttaccgtcctccgcacggaacagcgcattatacacctgcccgcagcgtgcatccatcacagcacagacgatacccgtcagctgccgtgcgttctccgccatagcgcgcagcgtggaaacgcccgcgcacgggatgttccgcgtcatggaaagtcccttcacgcaggagacgccgatgcgcacccccgtgaacgaacccggcccggcggagaccgccatgcaggtcacatcgtcaagcgttttattcgtgagcttcaaaacagattccaccatcggcatcagcgtctggctgtgcgtctgctttgtgttgatataaaattcagagagtatttttccgtcctccaaaagcgcggccgaggccggcgccgcagaggaatcgagtgctaaaatcagcatatttgtcgctttcacgcgattttttgccgcgcaaaagccgtcctttctatcagaaacttatcacaggtctatgccctcaatggtaacgatgcgctccgtctccgtctcgcccttttccatgtggacataaatcgtgttttccggcaaagcgccgtcaatgttttcgctccactcgatgacgagcacgttgtccgtatcgaggtaatcgaaaaagcccgtggagtagagatcgtcccaaccggaaacgcggtacatgtcaaagtgctgcaccgtcagccgcgcatcgtattcattcacaagcgcaaacgtcggactggagaccacgtccccgccgccaagcgccagcacaagtccgcgcgtaaacgccgtcttgcccatgcccatcggtcccgtgaacgcgatgacctcgccgcccttgagcttttccgccagcttcgctgcgattttttcggtgtcctgcaccgagtgagaaacaaaccgttgcatcagaacaggccgtggatcacgccgttaccgtcgacgtcgatcttttcggcagacggcaccttcggcagaccgggcatcgtcatgacatcgcccgcatacgcaaccacgaagcccgcgccgttcgagaggcgcaagtcacggatcgtaatattgaagccggtcggacggccgagcagtgtcgggtcgtcagaaagcgaatactgcgtctttgcgatgcacaccggcagcgcgtcgccgccgagcgccttgatgtccttcagggacttcatcgcctggttcgtgaacgtcacgtcatccgcgccgtagattttctgcgcgatcgtgcggatcttctcctccaccgtgagatcaaggtcatagatcggcgcaaagtggctttcaggattctcgtcgatgaccttgcagacggtctttgcaagctccacgccgccttcgccgccctttgcgaacacttcggagagtgcatactctacaccgagggacttgcagcaatcgtcgatgactttcagctccgcgtccgtatcggtgccgaagcggttaatggcaacgacgaccggcacgttatatttgtgcatgttctccacatgtgcgcgcaggttctcaatgcccttttcgagcgccggaacattctcctttgcaagctctgccttcggcacgccgccattatatttcagcgcacgaaccgtcgcgacaacgacgatgcagttcggcttgaggcccgccaaacggcacttgatgtcgaggaacttctccgcaccgaggtcggagccgaagcctgcttccgtaatgcagtaatcgccgagcttcagcgccaagcgcgttgcgcgcacggagttgcagccgtgcgcaatgtttgcaaacggaccgccgtgcatgatggccggtgtgtcttcaatcgtctgcacaaggttcgggttgatggcatctttgagcaaagccgtcatagcgccatccgccttgatgtccttcgcatagaccggcttgccgtcatacgtatatgcaatgaggattttgccgaggcgctctttcaggtctttcaaatcctttgcaagacacaaaatcgccatgacctcgcttgcgacggtgatgataaagccgtcctcgcgcgggatgccgttcaccttactgccaaggccgatgacaatgctgcgcagtgcacggtcgttcatatcgacgcagcgcttgatgagcacacagcgctgatcgatgcccagcacgttgccctgctgcatgtggttatcgagcatggcgcacagcaggttatttgccgaagtgatggcgtgcatgtcacctgtaaagtgcaggttgatgtcctccatcggcaacacctgtgcgtagccgccgcccgcagcgccgcccttaatgccgaacaccggacccagagacggttcacgcagcgcgatgacggcttttttgccgatcttcgccatagcctgaccgaggccagccgttgtggtggtcttgccctcgcccgccggcgtcgggttgatggccgtaacaaggatcagcttgccgtccggctcgttttcaagtcttttgaacaggtcatcattcagctttgctttaaagcgtccgtagggctccagctcttcgggacatacatgcagttcttccgcgatctccgcaatcggtcttaattttgtctgctgcgcaatttcaatatcggtaagcattgcaaccaacctttcatttccgttcttttccgttttgccgcacgccgcagcatacggacatcgttataccttatagattatagcgcaaaaaggcgtttccgtaaagaggaacgcgcttttttaacggaaaaaaatctggatattgccccttccttttctgtgtgatatactaaaatagaaattttgttgaaatttcgctttttatttctaacgtcttacaaagacttttacgctttgttttactttggcttcttctgattttttgaaagcaggtgatcttacgaaagacagccgcattttccttgctgtttcgtcctttttccgccgtacggacaagcttctttggcttttgatgctcacaatatccacgttcagccttattcttctgaaaagcgtttcccgcgcgatgaacacggattatttcaaaacgcagctcgtcgtgaccgttgcgggccttctcgcggcgcttgtgctctccttcatcgattacgaaagcattgcgtcgttctggtatctcatcgcgggtttttccgtttttatcatgctctacaccatgtttttcggcatcagcgtgcagggcagtgagggcgtcaacgcgcgcgcgtggatcagccttgcgggccgcacgttccagacgagcgagcttgtgaaaatctgctttatgctgacgtatgcaaagcacatctctgttttgcgcgtgcaaaataaaatcaatcaccctctgcacgtcgttctgctcgcgctccacgcggcggtgcccgttctgctctgccatgttcagggtgatgacggcgccgcgatcgtttttttcttcatgttcctgtgcatgagcctcggcggcggtgtgcagctgcgctatttcattttgctcggcgcgcttgtcgccgtgtccgtgcccgtgctgtggaaatttgttctcagcgaatatcaaatcaagcgcttcacatctgcctataatctggacgacccatctattcagctcaatgaaggctaccagcaggtgcagggacgtatctccatcggtagcggccagctgaccggcaaagggctgtttaacggtccgcgcgtcgaaacaaacctcgtcacgtttcagcacagtgatttcatcttctccgttgccggcgaggagctcggcttcatcggctgcaccgccatcatcgtattattgttattgtatctcctgcgcgtgctgtatatcgcgtcaaaggcgagggacgacctcgggcgctgcatgtgcttcggctttttcgggctcatcgctttacagtccgtctcgaatatcggcatgtgcctggcgcttctgcccgtcatgggcgtcacattgccgttcttctccgccggcggcagcagtgccgtgtgtctgtacctcggcttcggcctgatacaaagcgtatacatgcatcgccccgacgccaacgtttctcacctgcgcagtacaagaacgctgaaaatgaacttccgtaaattaaacgcctaagcttccggtaaccatggctaaaagtctttcgtcaagttttcttcgagaaaacttgcgggctcttaggacaacgcccaaggcggcaaaacgccgccttcagaaaaacaacacccaccaaaaagcgtatcgctccgagcttcaaaagccgcaagcgatacgcttttattcttcctgttttttcacgtacaaatatgcgtttttctccttacccacacgctccaaaacacccatggaatacagcacattcgccgcacactgcgcctgcgtctgcgcgcgtcgcatcgcttttgcaagcgttttcgtcgtaaacggctccggcaggtcttcgggcagcaaattcaaataatcccaacggctctcgcagatcacttcgccgagcagtgcttccgggatacgctccccgcgcgtcgcgcgcagcttcttttgcttaccgtaaccgtcgagatacttgtagtccgtcacctccaaaagcgggatacgcagccggaaattcgggtgcataagctgatttttgatcttatacagttccgggaaaacatcatacgctgcgccctttttcggtgattttcgcttttcgaagatctcgcccgtttcggggtccacccagcacagcccgcgctttggcaccacagggtataccaccgtcacgcgcgccgcttccaaaaacgcgtcgagtttgcggctcagccggtcaaacccgcgcgtttgaatttcgatgattccgttttcgccgacaatatccgccacaaagccgcccaccttcacttcgcggctctcaaaatcgggttcgtagtagcttttcagcgccgcatgcaaagctttttccgaaagcgtaccgatgccgcctgcgccgccaacgcgccccagcgcctcttttcgcgcctgtaaaaaacgttccgtgtcgatcaccgtgctccccctctctgctggtttataaaaacagtatatcgaaaaacatggtaaaaagcaacagaaaagggcgatgcagccaaaaccgcaccgccctaagggaaacatgtgaagatttagaaacggttacgctctgcgctcaaacgtgcagcattccgtctcgctgacgacctccgggtctgcgcaacagcaacccacacagacgcagtccgcgctgcacttgtggttatcgttatacgtgcagtgctcggcgctgcaatgcacatcagctgtggcgctcggtgaagacgagcatccgcaggagttttcggaggaagacgtgcgctctgcataagagccgcagcaggtctcgcggctttccagcgcggcggggccgtccacctgaattttgcgcagctcgcacaggtcgtttgcgttgtgtcggcaggtcgtcacgctacatttcagcttgttcatatcggtccagatcctttccttttgaatttctaagttcgtgccgcactttggcgacttctttagcctgcccgcaaagtagggttttatgcaaaagccacatttgcacattgtatgcgctgtcaaaaattgatatttgcacggttgttttccatgcattttttcaacaaaagccccgtaaatgcatattttgtacttgcattttgttaaagcaaacgctataattgtattaaattaccaaaacactacttaaaggagttattttacatgattcgagtcactgtctggaacgaatatcttcacgatgacccaacctttgagcattgcagcgaggaggccatcaagcagcatccgaacggtctgcacgaaaccattgcagacatcgtccgcgaactgggcgacgaagttgaggtacgcactgcacagatgaaacagccggaaaacggcctgaccgacgaagtgctggaaaataccgacgttatgatctggtggggccacatgggccatcagtttgtcgccgacgaggtcgttgaaaaggtctacaagcgcatcatgaacggcatgggtctcattgtgcttcattccggccactattccaaaattttccgcaaattaaacggcaccacatgttctctgaaatggcgtgacggcacctacgagcgtcttttcaacgtaaagccgacccaccccatcgcagacggtattccggagcatttcgagctcggcattgaagagtgctacggcgaatattttgatattgctaccccggacgacgttattttcgagggctggtatgacatcggcgaagtcttccgcagcggctgcaccttcacccgcggctacggcaagatcttctatttccagccgggccacgagacgaacggttccttctacaatccgtacgtccgccgcatcatccagaacgccgtgcattggtgctataatgataagaacagacgcatcacccttggcgcaccgagcatcgaagtcacgctcgagcaggctcgccttgaaggcaacaccggcgaatacctcaagatgtgggactaactcgcttttctaaaacagaataattttaccgtttcgcagtccacggctctgtgtttgcagcgccgtgggctgcttttctttatatatcctgcaccgaaaacccgcacagcgcttgaaaaaacacggaagatatggtatactaaaccgatatcgcccgagcggcgacgcgtgtgcgcgatccgtttcgtgtattcgcatattttatacggcaaaagagtaaaactactggtatattgttcttttattcttttgaaaattctttttgaacactcaaaaaagtgtttgcgcagtgattttctgcgcgggaaggagccctttatcatgaaaaaaacagtttgcgtgatcttcggcggtgcgtcttcggaatatgaagtttcgctgatgtcctccgcttcgatcatccgaaatctcgatacagagaaatttgacattctcaccctcggcatcacaaaagacggtcgctggctgctctattcgggtgctgtggaaaacattgaaaacaacacgtggatgaacagcgagaccgcgcgccccgcgttcatctctcccgataaagcgacgaacggccttgtcgttctgaacgcagacggcagctataccgttttgaaggtcgatgtcctcttccccgtgctgcacggcaaaaacggcgaagacggcaccattcagggtctctttaagctcagcggcatcccgtatgtcggctgcggcacactggcttccgctgtgtgcatggataaagccgtcacccacacgctgctttccgccgcgaacatcgagcaggcgcactacctgtggttctacgccgaccgctatttcgcagacggcgagaagatccgaaacaaaatcgccgcacgcctcaatttcccggtgtttgtaaagccggcaaatgcaggctcctccgtcggtgtcagcaaggtaacggctcccgaaaagctcgacgccgccatccgccttgccgccgaaaacgatacgaaggtcgtcgttgaagaaggcatcgtcgggcaggaagtcgagtgcgccgtgctcggaaaccgcggcaaaagcgtcgcttccccggtcggcgagatcggtgcgggtgcagaattctacgattatgacgacaaatataagaacggcgtcgcacagctcttcatcccggcgcgtctgcccgaagacgttacggaggaagtgcgcaagacggctgttcgtgcctacaacctgctcggctgcgacggcctttcccgcgtggatttcttcgtcaccgaaaaggagcacaaggtcattttaaacgagatcaacacgctgccgggcttcacgtccatcagcatgtacccgaagctctgggaaaacgccggtaccccgtacagcgagctgcttgaaaagctcatcgactgcgctttcacgcgtgaagactaacgcgaggcgcaatttatggataacagacccatcggcgtatttgattccggcctcggcggcctcaccgccatgcgggagctgattcgcaccctgccgaacgagaatatcctctacttcggcgataccggccgcgtgccctacggctcgcgcgggcgcgagatcatccgcaaatacgcaaagcaagatatgaattttctcatccggcacgacgtaaaagccgtgttggccgcctgtggtacggtcagctctgttgcccgtgacatcggcgatgcgctgcccgtcccctattttgatgtgctgcgccccacagcgcgcgccgcggtggagcaaacgaaaaacggcaagatcggcattatcggcaccgccgccaccatcgcttccggctcctaccgcaaggagatcgagcgtctcgcgccgaaaaccgaagtgtttgagcaggcgtgccccttattcgtgccgctcgtagaaaacgcgttcgtctcgccggatgaccctatcccgcgcctgacggccgagcgctacttaacgcccatccgtgaagccggcgtggatacactcattctgggctgcacgcattaccccatcatcagcgagaccatccgccgcgtcatgggcgaaaacgtcacgctcatcagttccggtcgcgaagccgccaaaagctgccgcaccgtgctggaggaaaacggtctgctgtgcgacggcaaaaccgacggcacacagcagtattttgtcagcgacgacaccgaaagcttttataaagtcgccgagctcttcctcgggcaaagcgttgaaagctgcgtggaatgtatagatattgaaaggtactgagtgattatgcgcgaagattacgaaatcaccatcatcggccgccaaacgattgacgcacagaccgatgaaattcaggtggatacgctcggcgattacaccgagcgcggcggcgcaaagtatatctcctatacggaatatgccgatgaagcgccgtataacggtcagctcaaagtgctcaaaatcgaaaatgaggataccgtcaccatgctgacccccggcacgcccacccgtctggtgctggaaaaaggcaagcgccacaaatgcctttatgataccggcgctggcgtgctctccctcggcgtatatacacagacgttaaagcatgacctttccgctgcgggcggtgagctgtgcatccgctatacgctcgacatcgatacccagctttcctccagcaacgaaatctgcgttcgcctgcgcaagcgtgatctattcaataaataaaccgaaaggaacatcccctatgtctaaagcagtaagcattgcaaaagaacaggtttctgccgtcattgaagcggcgatgaaaaaagcgatggctgcgggcatgctgcccgaagcagagctgcccgctttcaccgtagaacgcccggcagaccgctctcacggtgatttcgcaacgaacgccgccatggcttccgcgcgtgcattccgcatggcgcccccgaaaatcgccgcggctatcatggaaaatctcgacctcaacggcacctacttcgttaaggctgagaccgccggccccggcttcatgaacttcttcctcggctccgcgttttacagcgatgtgctgaccgaagtgctcacaaaagacagcgcatatggcagaagcgactacggcaaccaccgcaaggtcatggtcgagttcgtttccgccaaccccacgggacccatgcacatgggcaacgcccgcggcggcgcgctcggcgattgcctcgcctccgttctggatgccgcaggctacgacgtttggcgtgagttttacgtcaacgacgccggcaaccagctcgataaattcggtctctccctctccattcgctaccagcagctcttcgcggaaaatccgccggagctcccggaggacagctaccacggcgaagacattcttgacctcgccaaagagtacgccaaagagcacggcgatgagctgatgcacgtcaccgaagaagagcgccgcaaggcactcgtcggcttcggcctgccgaagaacattgcgaaaatgaaggccgatatggaaaaataccgcgtccattacgaccgctggttcctcgaaagcgacctgcacaaggacggcgaagtcatggccgtcgtcgattacctgcgcgaccgcggcctcacttacgaaaaagacggcgctgtctggtacaaggcaaccgagttcggcggcgaaaaggacgaagtgctcgtccgcgccaacggcaacccgacctactttacggcagacatcgcctaccacaagaataagttcgaccgcggcttcgacctgctcatcgacatctggggcagcgaccaccatggccacgtcgcccgcatgaagggcgcgatggacgccatcggtcagagcgccgataagctcgacatcatcctcatgcagtttgtccgtctgatgcgtgacggccagcccgtgcgcatgagcaagcgtaccggcaaagccatccagctcggtgacctgctcgatgaagtcccggtcgattccgcaagattcctctttaacatgcgtgaagcgaactccctgctcgacttcgaccttgacctcgccgtgcagcaggattcccagaaccccgtgtactacgtccagtacgcccacgcgcgtatttgcagcatcctgcgcgcactggaagccgagggcgtcaccccgcgcgactgcaccgcagaggaactcgcattgctcaccgcgccggaggagcttgagctcatccagcacatcgcgtcttacaccgatgaaatcatcggcgccgcaaaggactacgacccggtacgcatcacgcgctatgttatcgagcttgcaacaaagttccacaagttctacaatgcctgccgtgtaaagggcgaggaagaaagcctcatgcaggcgcgtctcaccctctgccgcgccactgcaacggtcattcgcaacgtcctcaccatgttcaacatcaccgttccgacatccatgtaatcataaacagcaaagaagtcgctcccatttccgagagtggctccttttgtataagaaaaccgacggcacaagttccctcatgccgtcggtttttctatcctgttatgcgcaaatgtgtggtattacacgttatactctaaaatttgccggcagattattcgcctgcgagcttcttgccaagcgcaatgcacgctgcgtctgcttcgtcgtccggtgcttcgttgcagatgacgctctcgcctgcgaagaccgcgccgtcaccaaggcaggtctcttcccagttgcgcatccattcgccgtcgccccagccgtaagagccgaacaggccgatcaccttgccggaaagctttgcttcgcactcggtaaacaccggctcaaactccgtgtcttccagctgctcggagcccatagacgggcagccgaacgccacagcctcatagttatccatcaagtctgcggagaactctgtgcagttatatacatctgcctctgcgcccgctgcgcgaacgccttctgcaaccttttccgccatcatctgggtgttgcctgtaccactccaataaacaactgctgttttacgcattttttgtaacctcttttcaaaaatttctttatatgtcaggcagctacggtaagctgcaaaacacttctgccttcctgccacaaacgcttgtagatgtcccggcacttcttataccgcgcaaatgtgcgcactgcctcgcattcgttgcagtacaccttccaacatccgcagcacttgcagttttgcccggcgttttcaatgaacccaagcacgtcctccaccgggtagccgaggaaaagcccaatctcatgcgggaacccgtctccgcttgcaagccgcatgcgcagccgctctatcgcgccgtccacgctcgtgttcgtgtagccgtagcgttccaaaagctcctttgcgccggggcgctccaggtcttttgcaagctgcgtgcggcggcacacataaatgagcatcgcattttcttcgcgctttaagatcagcagctccacgcctttatcgcggaatatgcgattcaaatgctttacatcgtcctccgggtcctgcgctgcgtggtaagaaaataaactcgccgttttaagcgacgccagcgtcggcgcacaatgctcgatcaagtatttctcaagcattgaaagcacactctccgcgcacagccgcacagcaatctgccagtacactgtgcagcgccgaggcactgctgctcggcacatacgcgatcggaatgttatttcttttcgcttccttggaagcgctcagcatcattttgtgcgagaccgtgctggtgaaaagcaaaaggtagtccggcgtgccgagcttctttttcaaggagccgttctccttcacatacacctttgctttgcagccatggttcttgcagatgtccatgtactgacataccatgcgttcattgccgccaacgatcactacgctcatattctatcctttctgcctgcaaaagcgtttcacaggctgcccgtaaaaccgggctttgcatttgatttaagttagcttacgctaactcttttgctttaaataaagcggattctcaccgctatgtgttatctttaaagttagtataaactaacctgttcatagtatactaaactcgtatacatttgtcaacccctattttgattttttattcgaaagctttcaccccgccgtttttcacagaacgaaagccgcgttccataacccggctttatcttcatttattctgctgttacctatatccccaatgcccgctcttcttgcgcagcttcactttccccgagacggcagcgccgcagcccgccgcacgcaagaccggcacgcaaatttccgtaaaaaataagcgcagagaattcctctgcgccaagcttatttttcgtttttcaaaaaggcttcctgcaccgattccgcgcggctttcggccacaagcaccaacccgcggcgtttgtctcccgtcagcacggcgctttccccggtcttcagcccgataagcgccaaggcctctttcggaatatgcacaccgccgttttcgtcgatctgcaccgtccacattttgcggcctttcggcacccgtttttccatacgccgctccttaataatacgcggtcagcggcacattgccgttttccttgcccgcgtccatcttcacgctgtctatccactgcactgcacgtcctgcgccgagaatcacgcagtcctccggctcttccgcaatgcgcacgcgcattttcgtctgcttcgagataagcgtgtccagcccacgcagcttcgcgccgccgcctgtcagcacaatgcccgcgttgccgatgtctgccgtcagctccggcggcgtctcctccagcacactctgaattttgtgcacaaccttcacaacggattccagcatggcttcgccaatctcgtcggaggtcacttccacctttgcaggcaggccgttgcgctcgtctctgccgcgcagctcgtatttttcaatgtccttcagcgggaacgcgcagcccacggcgcactttgccgcctctgccgtctgctcgccgataatcaggtcaaactttctgcgcgcgtatttgataatatcctcgttgaataccgcgccgcccacggcaatgctgccgcttgcagaaagccgattcatcgaaagcacgccgatgtcgctcacaccctcaccgagcgtgacaaccatgctgccgtgcgggcgggaaatatccagccccgcaccgatcgccgccgccaccggcgcttcgatcaagcacaccttgcgaatgccgttcgccgccacagcgtccaccaccgcacggcgctccacttccgtaataccgctcggtaccgccacaacggcgcgcggcatgaaaacgcggctgttcgtcacctttttcaggtagtgctgcagcgtcgcgtccatcagcgtcaaatcggaaatcacaccgcccgtcacgggcttgaccacgcgcacgcgatcgctcgtcctgccaagcattttatacgcgcggcgacccacggccaccacacggttagagtcttcatctacggcgatgacgttcggttcatccaccacaacgcccttgccgtctacatataatctgaaatttgccgaacccaaatcgatcgcaatatccgtaccggccatggtaccatcctctcgcgttatactgtcctttattttacatgactttttcccgttttgcaaggtctaatcgaccgtcgcgcacgaaacacagcccacataatccgccccgtttcggtacaacacctttgcgcattccacggccgtcgcgccggtcgtcacgatatcgtccaaaagcagaatgcgcagccgcgccgcaccctccgcgcggtacgccccacgcacattcgcttcacgttccttggcgctcaaattgtgctgcgtgcggttgtgcttcgtcttctccaaaatatccgtgcggcacggaatacccgtcagcttcgatacctcttttgcaagcagcaccgattgatcgtacccgcgctgtttcagcctctcccggctgatgggcaccggcacaatacagtcccaaacccggtttttatcgatcgccggcagcattaactttgcaagcggtttcgcaaggttcgtcccgtttttgaacttgaaccgccacaaggatgaccgaaacggctccttgtaccgctgcggcgcacggcattccagtgtgtaatcccgtcttcctgcatgcaacgcgaaaaaccgcacgcgaatatccggctgcagcttcgcgcagtccgcgcacaactcgtcctcgttcaccgctcccgcacgtccgcacaaaaggcatcgcttcgggtaaaagaacgcgagaatcttctctaaaacgctcatgcttccgcttcctcattctgctccggcccgtcttcctccggcttttcgagcaaaaagtgctgcaagccggaaaaccgccgcgtctttttatcgttcgccaccatatcggcgactacactgcgcttgccaaccaaaatcagcagctttttcgcgcgtgtaatgcccgtatacagcaaatttcggtagctcagctgcggcgcgcccgggaacatcggcatcaccaccgccgtaaactcgttgccctggctcttatgtaccgtcacggcgtaggcaagctccagttctgctgccgcgtgctcaaaatcatacaacacctctttgtcgtcgatttccacacgcagacaaccggcatctttgtccacatcggtgatgatgcccatgtcgccgttatatacgccttcgcccaccgtgccgtcttcgcggctccacggcaggttgtagtcattcttgatctgcatcaccttgtcgcccacgcggaaagccgtgccgttcaccgtcacctgcggcttgtttttcgcgggcgggttaatctgctcgcgcagcttacggttcagctccaccgtgccaagctcgcccttgcgtcccgggcataatacctgaatgtccgtcaccggcgaatacccgtagcttttcggcaagcgcgtcaccacaagcgactgcaccgtctccgaaacggagtgtgcatcctcgcgcggcataaaaaagaaatcgttgctgcgcacggaaagctccggcatctcgccctctacaatcttgtgcgcgttcatcacaatgagactctccatcgactgacggaaaatctccttcagttgcactgttgggaataccttcgacgcaataaggtctccgatgacattgcccggcccaacgctcggcagctggtcgctgtcgccgaccaagatcaaacggcagccgatgggcagcgcgcgcagaacgctttcaaacacatacgcatccaccatggaaagctcatcgatgaccactgcgtcacactccagcggattgcgctcgtttctctggaacaccgggtcatcgttgtcgtcccagtccacctgtaacatgcggtgaatggtcttcgcctccacgcccgtcagctcggacatgcgcttcgccgcgcgccccgtcggcgccgccagaaataccgtctcgcctttttccatcaaaatgcggataatcgcgttcagcgtcgtcgttttgcctgtgcccgggccacccgtcaaaatcaaaagacccttttccagcgccgcgcggatcgcatccttctgcaattcggcgtaccggatgccctccgtgcgctcgatttccgcaatctcccggtcgatgcccgtaatggattccggcgggtagcgcagcatcatatggatgcggtcggcgcagtacacctcgctgcggtgctgcttcggcaaaaacacgaagtcacgcccgttaaaattctcgttcaccgcctcaaacgtctggcacagctcaagtaaagcctcctgcgcactctccggcggcacgcccaaaagcttcgcggccgccgcacacagtttatccgccggcaggcacgtgtgcccgttattcaaattgtgccgcagcacatacaacacgcccgccttcacgcgctccttgttgtcgcggtcatactccagcgactccgccagctgatccgccaccgcaaacgaaatgccgatcttatcgctgcacagccggtacgggtcttcctgaatgcacgccacagaatcctgcccgtacaccttccacaccttcacggtgtcctccgggcgcacgccaaagctgccgaggaatgccatcaaatcgcggatgccgttcacgcgctgcatctcctcggagatttctttcgcctttttcagcgtaatgcccttcacggttgcaagccgcgccggatcttcctcaatcaccttaatggattcatcgccgaacgcttctataattcgccccgccagcgcgccgccgatgcccttcaccgcgccgctcgaaaggtatttcagcatcgccgccgtgtccgccggacgggagcgctcaaacgcctgcgcgcggaactgctgcccgaacgtcgcgtgcgatgtccacgtgccatacaggtgcagccgctcccccacactcacatacgggaacgtccccaccaccgtgatgagctcttcgccgcaatcgacctccaacaccgtgtactggttgctgtcgttgtggtagacgatattttccacgctgccttccatttccagcagcccgttttcctgcggcatcggttgcgcccccttttacaatctttatctgtttctattatagaacattctttcgtgtttgaaaagccccaatctccgcaaacgggtatttttgcacaagtctgcggataatcgcgtcgatctccggatcgtttgtcggattcaggcacacaatgcggcacatgccgtataaatccagccacttcacgcgttccaaaacactgcgcacaatatactctgcgtcgtccgcgcggcgaatcgtcgcatacaccgtaaacggcagcgcatcctccagcattttcgaacgtgtcacgcgcaggcaaacgctccgtacagcaaataaaaagatacacagcgtaaacgcgcacaccaaagcaatcccgataggctccataaaaaacacctccgcgccagtctatgacgcgaaggtgcattcggttcttattctgttttgcgcaaattaaagcacggcagccttcagagcctcgaccttatcggtcttctcccactgcacgccgagctcctcacggcccatgtggccgtaagcggcgagctgacggtaaatcgggcggcgcaggtcgaggttgcggatgatcgcgttcgggcgcaggtcaaagaccttctgcacagcctcggcaagcttggaatcctccaccgtgccggtgccgaatgtatcgaccataacggaaaccgggtgtgcaacaccgatggcgtatgcaagctgcacctcgcacttctttgcaaagcccgcagctacaatgttctttgcaacataacgtgccgcatatgcagcggaacggtcaaccttcgtcggatccttgccggagaatgcaccgccgccgtgacggcctacgccgccgtacgtatcgacgatgatctttctgccggtcagaccgctgtcacctaccgggccgccgatgacaaaacggccggtcgggtttacataatacttcgtgttctcatcgatgagctccgccggaacgatcggcttcacaacatattcgatcatatccttgcgaatctgctccagagagacagcctcgctgtgctgcgtggaaataacgatggtgtcgatgcgcttcaccgtgtcgccgtcgtattccgccgtcacctgcgtcttgccgtccgggcggaggtagtcaagcgtgccgtccttgcggacttttgccagctgctttgcaagcttatgcgccaaagagatggtcagcggcatcagctccggggtctcatcgcaggcatagccgaacatcatgccctggtcgcccgcgccaatgaggtcgtcctggtcagcagcgccgtttttcgtctcaagggattcgttcacgcccattgcaatatccggagactgcatgtcgatggaggtcagtaccgcacaggtcgcaccgttgaagcccgcatccggagaatcgtaaccgatctctttgatgactttacgcgcaatcgcatcgatgtccacatagcactcggtggaaatctcgcccatcacgtgcaccataccggtcgtcgccgtcacttcgcaagctacatgcgcggtcgggtctttcgccatgatgtcgtcgagaattgcatcggaaatctggtcgcaaaccttgtccgggtggccttcggtcacggattcagatgtaaaaagatgtttgttattcatgttttgctcctttactcttttcactcacagcccccacaaggatttttcggaaaaaaagaaccgctcaaaagatgagcggttcaaaatcctcatctttcggcattgccatgccgcaggaattagcaccttgcaaaatgcaggttgccggacatcaaagggcctgttccctccgtcactcttgataagggcatattcatttttgactgtaaaagagtataacacagtttttcgcaaatagcaagggaaaaaccgcagaaaatcccggttttataccgacaaattccggcatatcatacgactttgccgttgatgaccggctccagcttcttatataccagaatcgtgataaccgcactgatgagccccttgcagaacgtaaacggcaagttaaagatcaaaagcgcctgccacaactcctgcacggacggattgattgcctgatacatgcccataatggcctccatcggcatcacattcgtgtagatcgggtaaatgatgaacagattcgagaagaatcccagcactgccatcaaaagcgcgccaacaacagagcccacaatcgcgccgccgtaattgcggtggtggcggtaaatcagccccgccggcaccacaaacgcagaaccgataatgaagttcgagagctcacccacaccgccggtgatggtctgcgaaagcagcacaaggtttttcacaaagcaaacggcaacgccgctcaccgggccaagcgtaaacgccgcgatcagtgccggcagctcggaaaagtcgagcgaaataaagctcggcataaacggcagctggaagtgtaaaaacatcaaaacggttgcaatcgccgccagtacgccggtcattgcaattttacgaatattcacattggaagtttttgcagtatttacggtcataaatgtcagaacctttctgtatgaatatcaggcagcgcaaggaaattcactccgcgcttgtattttccctttacgggaaaacacaaatccacgcagcaccgcctttagaatgccgcataagccatgcgcattcccaacttatactatgtcaatacagaaacgggggtaagaatcaaaaaagcaccccacgaaaactcgcggggtgccgaaatccttttgattcacgtttcttctatcatccggactataccgtcggctccggaatcacaccggatcagcgcaaaactgcggtcgcgggcttatgccaaaggcatttaccgccggtgaggaatcacacctcgccccgaagaaaatgatgagattttaatttgagcaaaaattactcgttgatacccgtaacaacgccggaaccaacagttctgccgccttcacggatagcgaagcgaagaccctcttcgatagcgatcggggtgatcagctcaacatccatgacaacgttatcgccaggcatgcacatctcggtgccttccggcagagagataacgcccgtaacgtcggtggtacggaaatagaactgcggacgatagttgttgaagaacggggtatgacggccgccttcgtccttggtcagaacgtaaacctggcccttgaacttagtgtgcgggtgaatcgtgcccggcttggacagaacctggccgcgctcgatgtcggttctctggataccacggagcagaacgccgatgttgtcgccagcctcagcaaagtcgaggagcttgcggaacatttcgatgcccgtaacaacggactttcttctctcgtcggtgagaccgatgatttcgacttcgtcggacatcttcagaatgccacgctcaactctaccggtagcaacagtgccacggccggtgatggtgaagacgtcctcaaccggcatcaggaacggctggtcagccttacgttccggggtcgggatgtagtcgtcaacagcatccatcaggtcgaggatgcacttgtactcaggagcattgacgtccttggactcgctggtgagtgcgaggtaagcggaacccttgatgatcggggtgtcatcgcccgggaactcatactcgttcagcaggtcacggatctccatctcaacaagctcgaggagctcttcgtcgtcaacctggtcgcacttgttcatgaatacaacaatgtacggaacaccaacctgacgggagaggaggatgtgctcacgggtctgcggcatcgggccgtcagcagcggaaacgacgaggatagcgccgtccatctgtgcagcaccggtgatcatgttcttaacatagtcagcatggcccgggcagtcaacgtgagcgtagtgacgcttgtccgtctcatactcaacgtgagcggtgttgatcgtgataccacgctctctctcttccggagccttatcgatcatggagtaatcctcgaactgtgcctggcccttcagagcgagaaccttcgtgatagcagcagtaagagtagtcttaccatggtcaacgtgaccgattgtaccgatgtttacatggggcttatttctttcgaacttagcctttgccattggaattgcctccttttattcagtaaaataaccttttgagtttattaccattgtagcaacaaaccgcaaaaaaatcaagtagtatttcgctttattcagccttttttctggaagcgatgatcgtttcagaaacagacttcggaacttcagcgtagtgagagggctccatggtgtactgaccacggccctgggtcttggaacgcatatccgttgcgtagccgaacatctcagacagcggaacttcgctggtgatctgcatagcacccggagtagcctcctgattctgcatgatgccgcgacgggagttgaggtcaccgataacgttgccgaggtattcctccggaacggtaacaacaaccttcatgatcggctccatgatgaccggatcagccttgcgcatagcatccttaaatgccatggagccggcgatcttaaaggccatttcagaggagtcaacttcatgataggaaccatcatacagcgtgactttcacgtcaacaacgttgtagcctgcaagtacaccggagagcattgcgccctggataccctgatcaacagccgggatatattccttcggaaccgtaccgccgacaactgcgttgacgaactcgtagcccttacccgggttcggctcaatacggatcttaacgtgaccgtactggcccttaccgccggactgacgagcgtacttcatatcggaatccgcattcttgcggatcgtctctttgtaagcaacctgcggcttaccgacgttagcctcaaccttaaactcacgcatcagacggtcaacgatgatctccagatggagctcacccatgccggcgatgatggtctggccggtttcttcatcggtatatgccttgaaggtcgggtcttcttctgcgagctttgcaagtgcaatgcccatcttttcctgaccggccttggtcttcggctcaatcgcaacacggataaccggctccgggaattccatggactcaaggatgatcgggtgcttttcgtcgcaaagggtatcaccggtagtggtgttcttcagaccgactgcagcagcgatatcgcctgcgtaaaccatttccagatcctgtctgtggtttgcgtgcatctgaacaatacggccgatacgctcggtgttatcctttgtggagttgtaaacggtggaaccagccgtaagcgtaccggagtacacacggaagaagcacagcttaccgacgaacgggtccgtagcaatcttaaatgcaagagcggagaacggctccgtatcggaagagtgacgaacgtcctcttcttcggtttccgggtttacacccttaatagacggaacatccgtcggggccggcatgtaatcaacaatcgcgtccagaagcttctgaacacccttgttcttataggaagtaccgcaggtaaccggaaccatcgtgttgttgatggtggacttgcggatgcaggtcttgatctcatcgatcgtgagctcttcacccatgagatacttctccatgagtgcgtcgtcctgctcggcgacatgctcgatcaactcggtgtgatacttctctgcgagctctttcatgtcttccgggatctcttcgcaacggatatccttgccgagatcatcatagtagacataagccttcatttccacgaggtcgatgaggcccttgaaggtatcttcagagccgatcggcagctggatcggtacagcgttgcacttcagtctctcgcgcatcatgttgacaacgcggtagaaatcagcgcccataatgtccatcttgttgacatacgccatacgcggaaccttgtattcctcagcctgacgccaaacggtctcagactgcggctcaacgccgccctttgcgcagaaaaccgttacagaaccatcgagaacacgcagggaacgctcaacttcaacggtgaagtcaacgtggcccggggtgtcgatgatgttgatacggttctggtgaccgtttctgtccggccagaagcacgtcgtagcagcggaagtaatcgtgatacctctctcctgctcctgtgccatccagtccatcgtagcggaaccgtcgtgggtctcgccgatcttgtagttgacgcctgtgtaataaaggatacgctcggtcgttgttgttttaccggcatcgatgtgcgccatgatgccgatatttcttgtaaattcaagtggtacctgacgggccatataatcctccttaatacgtttacaggtaaattaccatctgtaatgtgcgaaagccttgttggcttctgccatcttatgcgtatcgtcacgcttcttagcagcgccgccggcgccgttcagagcgtcaaggatctctccggccagtctctccttcatcgtcttttcagaacgaagtctggaatagctcgccatccagcgcagaccaagggtctgacgtctctccggacgaacctcgatcggaacctgatagttcgcaccaccaacacggcgtgccttaacctccaggctcggcattacgttctccatagcctgctcgaaaacctccagagcgttcttgcccgtcttctcttcgacgatctcgaatgcttcgtaaacgatcttctgagctacgcccttcttaccatcatacatgatgttgttaatcaggcgtgtgaccagtttggaattatacataggatccggcaaaacatcgcgttttgctacattgcctcttcttggcatagtcttccctccttcacataatagtatgaattcatcggtactcgaaagcacaagctcccgccggctaagaaaaggtatttacgcacgataatcagtagcttatctattataaatacccttaaagcgaatttcgcttttccggtcaaaagttcattgtgtaacgattaaatttggctctttaaagaaattacttctttgcagcgccggccttcggtctcttagcgccgtacttggaacgagcctgcatacgctttgcaacaccctgcgcgtcaagcgtgccgcggatgatgtggtaacgtacaccaggaaggtccttaacacgaccgccacggatcataacaacgctatgctcctgcaggttgtgaccaacacccgggatgtaagcggagacttcgataccgttggaaagacggactctagcaatcttacgaagtgcggagttcggcttcttcggggtagcagtcttaacagcagtgcagacaccgcgcttctggggagaatcctgatcgatagcaattctcttcttggagttccaacccttcagcagtgccggcgcctttgccttcttctcggaaactgcgcgacctgtgtgaatcaactggttaaatgtgggcatattgcacctccttacacaatttctatatatgtcatgcgggtttatattgcccgcagaacatgcgcctatacaaaacagtatcctgtccgtacaaaaatcgcgcggacaggtctgttttatgcggtttcaaaggcggttctggcagaaattctcagatttcatgcccacaacacaccatttgacattatacaccgctcattattcgtttgtcaagccctcttctgcattctgtgcggaagttttttcctcaaagctgctcaaagcggctacggcctcctggcttaaagagctgctcggcgccgtcggcgcaatttcaacattggtgtagcagtccatgccggtgccggccggaatcagcttaccgatgatgacgttctccttcaggccaagcagcgggtctaccttgcccttgatggcggcgtcggtcagcacgcgtgtggtctcctggaaggaagcagcggaaaggaaggactcggtcgccagagatgccttcgtgataccgagcagcgtcggcgtgaatgtcgcctcgcgcaggccggtctcgccgtttgcaattcttgcggcgatcttctcgttttcaagaagcgtgtcgttcttatcgacgagcgcgccgacgagcagcggcgtgtcgcccgcgtcttcaatgcgcaccttgcgcatcatctgacgaacgataacttcgatgtgcttatcgttgatatcaacaccctgcatacggtaggtgcgctgcacttcctcaatgaggtaatcctgcaccgcctccgggccgctgatggcgagcacgtcgtgcgggttgacggagccttcggtcaagcgggtgcccttttcaaccacatcgccctcttttacgctgaggcgtgcgccgaacgggatgaggtagctgcgctggtcgccatcgccgcgaacgacaatgtgacggttctttttgacctcttcaaagccgatcgtaccgccgatctctgcgatgattgcgagatgcttcggcttgcggctttcaaacagctcactgacacgcggaagaccctgcgtgatatcttctgcggatgcaacaccgccggtgtggaacgtacgcatcgtcagctgggtacccggctcgccgatggactgtgcggcgatgataccaaccgcctcgccgaccgtgatcggctggccgtttgcaagggaggaaccgtagcacttcttgcacacgccgtgacgggtgcggcagttcaaaatagagcggatcttgatgtgcgtcgtgccgcggccgatgatgaggtcagcttcggcgtcgccaatcatcttatccttagaaacgagcacgttgccattctcgtcgcagtaatcgtcaagcagatagcggcccacaatacgctccttaagcggctcaatggactcgttaccggatttgatctcgaacacttccaaaccctcggtcgtaccgcagtcatcctgacgaacgataacatcctgagaaacgtcaaccagacgtctggtcagataaccggagtcagccgttctcagagccgtatcggcaaggcccttacgagcaccacgggaagaaatgaagtattccaaaatgttcaggccttcacggtagttcgccttgatcggaatttcgatcgtcttaccggacgtattcgcgatcagaccgcgcatgccggccagctgacggatctggttcatagaaccacgggcgccggagtctgccatcatgaagatcgggttgtaacggtcaaggccgtcctgcagggctttcgtaacgtcgttcgtcgccttttcccaagtcttcagaaccgcgctgtaacgctcgccgtcggagaggaagccgtcgcggaaatctgcggtaatctcgctgatctctgcctctgcctttgcaagaatctcctgcttctgcggcggaatcgtcgcatcgcagacagcaacggtgattgcgccgatggtggaatacttgtagccctgtgccttaatggcatcgagcatttcgcttgtgaccgccgtgccgtgctttttgatgcacttgtcgatgatcttgccgagctgcttcttaccgacgaggaaatcgacctcaaacttgaggatgttctccgggtcggtgcggtcaacaaagccgagatcctgcgggatcgggcggttgaagatcatgcggcccatcgtcgtatcgacaaggcccgtatatgtctggccgttgtactccacggttcttctgaccttgatcttggagtgcagcgtgatatattttgcgtcatacgccatgaacgcttcgtccatgttgcggaataccttgccttcaccgatctctccgtccttatcgagcgtaaggtaataagaaccgagaaccatatcctgcgacgggaccgcaacagggctgccgtcggaaggctttaagaggttgtttgcagccagcatgaggaaacgtgcctctgcctgtgcttctgcggaaagcggcacatgcacagccatctggtcgccgtcgaagtccgcgttgaacgcggtgcagacgagcggatgcagcttaatggcgcggccctcaacgaggaccggctcaaacgcctgaatgcccagacggtgcagcgtaggtgcacggttcagcatgaccgggtggttcttgatgacaatctccagtgcgtcccaaacctcgctcttcgcgcgctctacggcctttcttgcagccttgatgttgccggcggcaccggtctcgacaaggcgcttcataacaaacggcttaaagagctccagtgccatttccttcggcaggccgcactggtacattttcagctccgggccgacaacgataacggaacggccggaatagtcaacacgcttaccgagcaggttctgacggaagcggccctgcttgcccttcagcatatcggaaagggacttgagcgggcggttgttcgggccggtgaccggtctgccgcggcggccgttgtcgatgagggcatcgacggcttcctgcagcatacgcttctcgttgcgcacgatgatgtccggcgcgccgagctcaatgagtctcttcagacggttatttctgttgataacgcgtctgtacaggtcgttcagatcactcgttgcaaagcggccgccgtccagctgtacgagcggacggatatccggcgggataaccggcacggcatcgaggatcatccactccgggcggttgccggagatgcggaaggattccacaacctcaagacgcttgagaatgtgcacgcgcttctgtccctgcgcggtttcgaggtcttttttgagctcttcgctgagcttttcgcagtcgatatcctcgagcagcttcttcacagcttcagcgcccatggacgcctcgaagtcgtcctcatatttttcacgcatgtcgcggtattccttttcggtgagcgtctgcatcttagagagctcacggacggaacccggatccgtaacgatgtaaagtgcgaaatacagaaccttttccagtacgcgcggggaaaggtcaagaatcagacccatgcgggacgggatgcccttaaagtaccagatgtgcgaaaccggcgctgcaagctcaatgtgacccatgcgctcacggcgaaccttgctgcgcgtcacttcaacgccgcagcgctcgcagaccttgcccttaaagcggatgcgcttatacttgccgcaatggcactcccagtcctttgtcggtccgaaaatgcgctcgcagtaaaggccgtcgcgctccggcttcaatgtacggtagttgatggtctcgggcttcgtgacctcaccgtacgaccaggagcgaatctgctcgggcgatgcaaggccgatctttattgattcaaaaacgttaaactccatatatgcgatcctttcctttcacccgaaattagaactcgtcgtcgatgccgtcaaacaaatcgttatcggagccttcaaactcatcatcgtcgccggtagagaagaagtcgtcctcttccccgtcttcgttctcgatggaatagccgtcgaaatcgccgtccgttgcgacgttctcttcctcaaagacctgatcgcccggggtgagacccacatcatcgtcatcgtcgaagctctggcgcaggtcaatctcctcgttgtccttatccagtaccttgatgtcgaggccgagtgcctgcagttccttgataagaacgcggaaggattccggaatgcccggcttcggcacgttctggcccttaacgatggcttcgtaggtctttacacggcccacaacgtcgtcggacttcaccgtcagaatctcctgcagggtataagccgcgccataagcctccaatgcccaaacttccatttcgccgaagcgctggccgccgaactgcgccttgccgcccaaaggctgctgggtaacgagggcatacggaccggtggaacgggcgtgaatcttatcgtcaacaagatgatggagcttgaggtagtacatgtagccaacggtaaccgggttatcgaaatactcgccggtacgaccgtcacgcagacggaacttgccgtcctcactcatgcccgccatgcggaagcactcgcggatatccgcttcgtgtgcgccgtcgaataccggggtcataatcttccagccgagtgcgtttgccgccatgccgaggtgaacctcgagaacctgtccgatattcatacgggacggaacgcccaacgggttcagaacgatgtcaagcggtgtaccgtccggcaggaacggcatctcttccatcggcaaaatgcgggaaacaacacccttgttaccgtggcggccggccatcttatcgccgacggagatctttctcttctgtgcgatatagcagcgcacgaccttgttgacgccggggctcagctcatcgcagttgtctctcgtgaagaccttaacgtccacgatggtgccgtactcgccgtgcggaacacggagggacgtatcgcggacctcgcgggccttttcaccgaagatggcgcgcagcaggcgctcttcggcggtcagctcggtttcgcccttcggcgtgaccttaccgaccagaatgtcgccggcgtgaacctccgcacccacacgaatgatgccgcggtcatcaaggtcgcgcagcagatcttcgttgacgttcgggatgtcgcgggtaatctcttccgcgccgagctttgtatctctggcttccatctcatactcttcgatatggatggaggtataaacgtcgtcgcgtacgattttctcgttcagcaggacggcgtcctcgtagttgtagccttcccaggtcatgaagccgataagcgcgttcttgccgagcgcgatctcgccgttcttaatggccgggccgtccgccagaacatcgcccacttcaacgcggtcgccgcggttgacgatcgggacctgattgatgcaggtgctctggttggaacgcatgaactttgtgacgacatagtcgtcgatatcgccgttatcggtcgtcacgcgaatgaggtctgcgctgacgctcttaacgacacctgcgcgttcgcacaggacgcagacgccggagtcaacgcctgctttatactccatgccggtaccgacgatcggagactcggtgcggagcagcggaactgcctgacgctgcatgttcgcgcccatcagagcacggttcgcgtcatcgttttcgaggaacgggatcatcgccgttgcaacggagaagaccatgcgcggggaaatatccatgtaatcgacgcgggtcggctcaacctgaatgaactcgcccttgaaacgcgcgagaacgctgtcgtttgcaaaggtgttgtcttcattcagcttttcgtttgcctgcgcaacgatgaactcgtcttccacgtccgccgtcatataaacgacttcgtccgtgaccttgcccgtcgccttatcaatctttctgtacggcgcctcaatgaagccgtagtggttgattcttgcgaacgttgcaaggtaggagatcagaccgatgttctgaccttccggggattcgatcgggcacatgcggccgtagtgtgtgtagtgaacgtctcgaacctcgaagctcgcacggtcacgggaaagaccgcccgggcccaaagcggagagacggcgcttatgcgtcagctcggccagcgggttcgtctggtccatgaactgggacagcggagaagaaccgaagaactccttgatcgctgcaacgaccggacggatattgatgagagaatgcggtgtaagggattccatatcctgaccctgcagcgtcatgcgctcgcggatcacgcgctccaagcgggagaagccgatgcggaactggttctgcagcagctcgccgacggaacggatacggcggttgccgagctggtcgatatcgtccgtaaagccgagaccgacagcaaggcaggtcatgtaattgatggaggagaaaatatcatcaatgatgatgtggttcgggatcaactcgtcatgacgtgcggtgagctgctctttgagcttctcttcgtcgtcgccgcactcttcgagaatctcggagagcactgcgtagcgcacacgttcgttgatgccgcactctgcctctgcatcaaaggaaacgtattttgcaatatcgaccatgccgtttgagatgaccttcgtctccttgtcgtcctcaagggcaacccaggcggtggtcacaccggcgttgtcgatgtcttcggcaagcgtgcgggacacaacggtgcccgcctctgccatcacctcgccggtcgccgggttgacgatcgggcgggaaagctgacggccggtgattctgccggcaaggttcagcttcttattgtacttataacggccgactctggagaggtcgtagcgtctcgggtcgaagaacaggccgttcaaatggaactgcgcgctttcaaccgtaggcggctcgctcggacggagctttctgtacacctcaaagaggccttcctccatggtgtgcgtggtatccttatcgatggtcgcaaggatgcgctcgtcttcgccgaagtattccttgatctcttcgtcggtgccgagaccgagtgcacggatgaacgcggtcatcgggagctttctgtttttatcgatacgcacgtagagtacgtcgttcacatcgttttcgtactccagccatgcgccgcggttcggaatgacggtggaagagaaaagctgtttgcctgttttatcgtactccatcttataatagacgcccggagaacgaacaagctgggaaacgataacacgttctgcgccgttgatcacaaaagtgccggacggtgtcatcagcgggaaatcgcccatgaagacttcagattccttgatctcgcccgtttccttgttgagaaggcgtgcagtgacgcgcagggctgccgcataggtagcatcgcgctctttgcattccgttaccgtgtaattgggtttttcgtcgagcttgtagttcacgaagtccagaaccagatttccgttgaaatccgtaatgccggagacgtcgtcaaaaacttccttcagaccttccttcaggaaccagtcgtaggaatttttctgaatctcgatcaggttcggcatatcgagaacttcattgatgtgcgagaagctcatgcgtgtgttcttgccaagctgtaccggcttaacattcaccattgactcaaccactccattcttagtatttgacccgtgtttttaagcaaaatcacttaaaaacggcggaaagaatatccgttcatgtgaattttatagattatgcttgattatttttcagaactgtgttataatgcagatcagagaaagaaatggcatatctatccatgatgatacattgtaatatgatacaccgtatctgtggatttgtcaagccttttcccgaaatttttcgagttttattccctttttcttttcttaaattccaaagcagaataaattgaattttgacccgtatacccgatagcacatggaccttgtaaactgcaatcgggctttatttttatccgctgctaatcattttaatttgaggaggaacactgcatgaaaaagcatttcgcaaagcagattttcgccgcggcccttgcaatcagcttcgtgtgcgggctttcggcatgccgtgaacgcgaacgtgaagaagagcaactctcgttaaagccggtgatttatctttatccggaagaagaaacggacgtctcggttacgctcgcgtacgacggaacgctcacttgcacctacccgaattacaaaaccggctggcatgtttcggcgaaacctgacggtactctgacggacgaggacggccaaacgtataactacctgtactgggaaggcacggacagcgcagaatacgacctttcccacggcttctgcgtagcgggcagcgacaccgccgctttcctcgaaaatgccttgcgcgacctcggactcacccgcaaagaagcgaatgaattcatcgtgtactggcttccccagatgcaggaaaatccctataatctcatcgcgtttcagtccgactgctatacgcaggtggcgcagctggatatctcccccgcgcccgacacgctccttcgggtcttcatggcgtggaaaccgcttgaagagaaagtcgacattcccgcgcaaacgctcaccgctcccgcccgcgacggcttcacagcggtggaatggggcggcagccgcataaactgagccgtagctcttgcccgtgcagagtctcacggcgttcataccgcttaaaaacacgcaaaaccttcccggtttccaaacggaaacgaagccgggaaggtttttgttttgtttatgttgaattttggatgccgaagaaattaagttaaaaagcgaaagccactttcaaaacgaattattgcgttttaagtatgtacttgcctgtacttttacgcggattcgcttacgtttctgcctctttcccctcgcctttttcgtccgcctcggtatcctcgcaggcacagatggacgcgaacgtgtaggactccagcttatcgcgcacaagctgtgagacttcaccgtagatgtgatgcaaacggcacgaggtgcgctggcagctgtacgcatcgccctggcagcgggaaatcatatacggcccctccaccgcctcgatcacgctgcgcagcgtgatctccttcggcggctttgcaagctcatagccgccctttgcgcccttatacgagcgcacgatgccgtccgaaacgagcgtgcgcaggatcttcagcgtaaagcgcagcgtgacgcttgtgcgctccgagatcgttttggcatctgctcgcccggggttcacggccaaaaattccacgatgcggactgcgtagtccgcttccagtgtcatgtgcatggtatgtgcctatcctttcgggatcaatccagaaaatccttcagcttcttgctgcggctcgggtgacggagctttctgagcgcctttgcttcaatctggcggatacgctcacgggtgacattgaattcctttcccacttcctcgagcgtgcggcttctgccgtcttcaaggccgaagcgcaggcgcagcaccttttcctcacgcggggtgagggaatcgagcacatcgccgagcgtttcgcgcagcagcgtatgggaagcggcatctgccggggccggtgcgtcgtcatccgggataaagtcgccgaggtggctgtcctcttcctcaccgatcggcgtttcaagggagacaggctcctgtgcgacgcgcatgatctcgcgcactttatcaaccggcatatcgagctcgtcggagatttcctccgcggtcggctcatggccgctcgtgtggagcagctggctggagaccttcttcaccttattgatggtctccaccatgtgcaccggtatacggatggtgcgggcctggtcggcgatggcgcgcgtgatggcctgacgaatccaccacgttgcgtaggtggagaacttgaatccctttgtataatcgaacttttcaacagccttgatgaggccgagattgccctcctgaatgaggtcaaggaactgcataccgcgaccgagatagcgcttcgcgatgctgacgacaagacgcaggttcgcttcggaaaggcgcttctttgcagcttcgtcgccgtccttgatggcgatggcaaggcgcacttcttcttcggaggaaagcagcggcacgcggccgatctctttcaggtaaactttaaccgggtcatcgatggcgacgccttccatgcccatgccggcatcaaaatcgtccgtatctgcgccggatactttggaaaggtcgatgtcatcaatctggatatcgctaaagtcatcgataatctcaatgccgtgcgattccagtgtatcatagaatttttcaatgtgctccgggtcgaaatccaattcgccgatggcgtcgaggatctcctttgtggtgagctggcctttgcttttgccgagctcaatcagatcgcggatcacggttttcttatcgggtgctgccatagtttatcatacctttcctgtgttttcccttattccctcggcagcgtctgcacgccgcctttttatctccattctgttttaaagcataacgttcctattttttctgtttgcgcagtgcatcgagctgcgcctgcaggtcggcggggttcgcaccacgcaccttatcggtatcggtcaacgcgccttcgctcaaaatgatctgcacgtattcttccgcgtctttggcggtgatgccggcgttttcctgcacaatcttcgcaaggcggcccatttcgtccggcgtacattccgccgaaaagtctgtaatctgcggcgatgtgaccgtttcttcgtttataatcttgcccaggaggctctgatataaccggcgattgaacgccgtcacgaatttttcgggcggcacgcggcggttcaggctctgtgcgaggtcattattgtggaaaaggcacgcgataagccgctcttcggcgttggccacgcggacatagcggcgcttttcggggtttacggtatcgcgccgcgcggaaagctgctccgtcatgtccctttgctgctgccgctgcgccgcacgcgcttttttgcgcacggaaacggacatctgctgcaaaatggcgtttttgtcaacattcaattcctgcgaaaggcggctgacgtacacgtcgcgctcaatggcgttttcaaggcccgccagcagctctacggcggccatcaggtattgaatacgcccgttttcgttactcagatcatacccgcttttcagctttgcaaggcggtattccacatcgttgccgctttgctcaatgagcctacggaaacgcgccgcgccttcatcaccgcatgcgttgatgaactcgtccgggtctttgttgccgggcacagccatgacgcgcaccaaaagccctgcgccgcgcagaatgggaatggcgcgctgtgcggccttttgaccggcttcgtcggaatcgtagcaaatgacgacctctttcgcatagcgggcaatgatgcgcgcctgctctgcggtgagtgccgtgccgagcgacgcaatggcgttttcaatgcccgctttgtgcagcgagatgacgtccatatagccctcagccaaaatgatgcggtcgttttcgagcgcgtttttcgcaaaattcatcgcgaaaagaccgctgctcttgtggtagaccggggtatccgatgtatttatgtacttcggcttttcatttgtcaaaatgcgcccgccgaacgcgaccacgttgccgcgcagatcaatgataggaaacatgacgcgtgcgtggaaacgatccatcgcgcggccggagcgcgtctccaccgcgacgttcgccgcaatcatctcgcgctcggaatagcccttggagcgcaggtgattgacgagcgcaaagcggctttccggcgcccagccgagcccgaaatggcggatcattttcatgggcaagcggcggcgcgtgaaataatcaagccccggcttaccctccgggcttaaaagcgcgctgtggaaaaagcgggcggattcgcggttgatttccaacacgcgctgacgcaggcggctcatggaatcgtccacgccctgctccggcatttgcagccccacgcggtccgcgagcattttcacggcctcgatgtaatcgagattttcaatcttacggatgaatgtgatgacatcgccgcccgcgccgcagccgaagcagtaaaacgagttattctccgggtagacgttgaaggacggtgatttttcgttgtggaagggacacagtcccaccatgtttttgccgcgccgctttaggttgacatacgaggaaacgatgtctgtaatgtcgcagcgcgattttaagtcctgcataaaggactccggcaacggcattccaccgccccctttcgtgaccgccggcgcgatgccgttgggattacgggcaaagctcggagcaaaacgccctgatttttgccctcatagtattatatacgccgcaaacggcgaaattacttcttttattcttcaaattcaaaaaatttttttccgtcttctgtcacattgacctgcccatttgtggcatccgcaagttttttgcggaatgtgccgagcagctcgggcgccaaatggaatttaacggtgactttttcctcaaagactgtgtcgtccgtcacgccgccgcattccggaacaagcgatgcaacgcggccgtaccggccgtaatcgcaggtaagcgacaacagcaggcactcgcgcatggtaatgatctgtgccgcctgcaaggcgatggacgcggtatgcgaatacgcacgaacgagaccgccgcccccgagcagaatgccgccgaaatagcgcgtggcaaccgtgacgacatccgtaacgccgcttttgcgcaggacatccagcaccggcataccggccgtgccctgcggctcgccgtcatccgaaaagcgcatggtgccgtcgcgcaggacatacgcatagacgttgtgactggcatcccagtgctcggattttttggacgtgatgaaatcgagcgcctcctgctcggtctgcaccgggcaggcatagccgatgaaacgcgatcgcttttccacaaactggtcctgcgcgtttttccgcacggttttgtactctgccatttttaccgctcccctctgttttgaaacgaacgcgatttgcctttggagaaaaaatgggcgatgcccgaaagagcaccgccctgaacgatccatataaatttacttcgtgataccgtagcgcttgttgaacatatcaacacgaccgcttgtatcaaccagcttctgcttacccgtaaagaacggatggcacttggagcaaatttcaacgcggatgtccttctttgtggaacgcgtgtgaatcacattgccgcatgcgcaggtaatggtcgtttcctgatagtccggatgtatattcttcatatctgtcacctctttcggttgatctgcggttagtcggttaacagcgaagttaacacataaacatagcgctaattatgttagcacaaaaaattctaaaatgcaaggtctttttcaaaaaaacagaaaacttttttctttttcttccagaaagcatccgtttttttcgttaggcgccgatgtagcgaaggtattcttcgaggcaaaaggagagtctgcggatggcggcggcgtgctctgtgccgacatagcgcaggacaagatcattgcgtttaaggccggtttcgtcctcttttccggcgggatagcggaacacaaaaccgtaatgcgccatgtttctttgcagccagccgtaggtatccgttgtcgaaaacgttgcggggtcgtcctgcacggtgacgcacaggccgctttgcaggtcgcttgtgccgggcgcggacacggtggattttgcgtcttcgcgcgccataatcttggtggaacctgccgcgataaggcgctcgacttcggcgttataaagcgcttcctgctctgcataggacacatagccgccggaaaacttgagcgtgacaccgtctgcttttgcggcatggcacagtgcggtgagtgccggcacaatgcgggcatcgaccgtgacgctgtcaaactcggcggtctcctcgggggcgaaatctgcgtccgcagggtggtcttcgttgatgacgaacagattcacgctgtcctcgagcacgggcaggtcgttttcctccgtgcttgcagcgggggacgcggtgggcagtacggtggcctgcggcagggaatcctccggatcttcgggcgggaaaagcaccggcaaaccccacatgacgaacagtgcaagcgccatgaaagcggcggcgcagataagcagaatgcccgtccaacgctttaggttcataatgcgctccaaatgcagcggacgcggcttttggatggggctgtatttttttcgtttccgcacagtgctctcccctttctttcggtatcttttactattatatcggatgacgggaaaaaagcaagtcgaattcctttacaacagaaaaacgcccgagccgtgaagcccgggcgctgtgcatttcagttaacgctattttttgaagaattacttctttttgcttttacgggaggggatctcggtggtttccgggtctacctttcccatttcggaagctgcactgctaagaccgtcctcgccgctgctgagcttgccgttattgacgatgaggttcgtgacaatgccgacgatgagggcaacagccaaagacgtgatgttcagcagagcgccgccggtgatgctgttcgtgccgaagccgaagtacaaaccgccgatgccgcagacgaggatggagctgacgacgaacaggttcttactgttgccgagatcaacacggtggagcatctggagaccggaaacggcgatgaagccgtagagcgcgatgcacgcgccgcccatgacgcacttcggaatggagttaatgagcacgacgaacggagtgaagaaggaaagcaccatgcagccgagtgccgcggtgaggatggaaacgatggaagcgttgccggtgatggcgatgcagccgatggactcgccgtaggtggtgtttgcacagccgccgaagaacgcgcccacaatggagccgaggccgtcgccgatgagggtcttatcgaggcccgggtctgcgatgaggtcgcggttgacaaccgtgctgaggttcttgtggtcagcgatgtgctgtgcgagctcgacgacgccgatcgggatgtagatcatggcgatgttgccgatggcagccgcatcaagcggatactggccgtttgtctcgattgctttgaggaagaagaacttcggataatcgacgatgctggtgatgctgaatgtgccgaatgcatcgatgaacggctggaaggaaagaagcttgaggctctctgtgcccgttgccatgccgatgattgtaaagacgagtgcaagcgcatagcccgcgccgatgccgacgataaacggaatgagcttgacggttttggagcccttaacggacgcaacgacaatcatgaagaaggtgaagatgccgcagatgatggcagcccagttgtaggtctcgccgtatacgacagctgcagcgccgttgcccatgatccagcttgttgccgtgccggagagggacagaccgatgagcgcgacgatcggcccgatgatgacggacggcatcagcttattgacccaaccggagccgacgaccttgatgacaagaccgatgatgacgtaaacaagacctgcgaacgcaacgccgatgagcatgccccagtagccgtaattctgaccgattgtagcagcatacgcgccgaggaaagtgaacgaggagccgaggaataccgggcttctgcgcttggtgcagaacaggtatacgatggtgccgatgcccgcgccgaacagtgcggctgcggcgtctgcctgcagaccgtagctggtgacaagcagcggtacgagcagcgtagccgccatgatggcgatcatctgctggaatgcgaagaccagtgttttgctgaacttcggcttatcttcgatgccgtaaatcaacttcatgaaatcatttcctttcttccgaaccgtggtttcatttcttaccccaaaacacgttctcttctcccctatgcttttccgaacataaagaaaagctctgcctgtaaaatgggcagagcttgagccttgtcagcacgccgtctgtaaagacgtattaagagtcaatcttgccaatatcacagtatcggggttaaagatcgtatttcgttttccaacgctaaactatagcacaatattcgacgaaagtcaacgtaattcgcgcacttgtgaatagtttgtgaatattcatcaaaaaaaggcagcacaagacagaaaaagctctccgaaccatgcgaagagcttttacgtttacaaggattactggtttttattcggtttatagctgactgtgccacacaggcgatcgcctgcgtcgccggctgcggtgggaatgtagccgttctcgttcagcgggccgggtgcgtagtttgccgcgtagattttgacatccgggtgcttttcatacagcagcttgatgcctacctcggacgcgaaaatgcacatgaacttgatgttcttgcagcctgcgtcctttaaaaactggatggcagcatctgcgctgccgcctgttgcaagcgccggatcaacaacgacgacggggccgtctgcggtatcgaccggaagcttaaagtaatacgtcatcggctttagggtttcctcgtcgcggtaaaggccgatgtggccgacctttgccgtgggcgaaagctcacgcaggccgtctaccatgccgagaccggcgcgcagaatcggaacgatggtgaaatcctctgcaagcaccggggtaatgatcttctgcagcggcgcctgaatctccacgtccttcgttttgagttccttgagcgtttcatagcccataagcatggcaagctctttgacgagttcgctgaattccttggtgccggtgttaacgtcgcacaggtggctgaccttgtgcttgatgagcgggtggttgaaaaccgtaagattggaaagatatgcttccatgtttgaccttccttagtccgtaagacggcgcaccgccttgtttcgtttattttcaaagcatatcatagcacacgctttgacaaaaatcaaccgaaagagacgcgtcttgacggaaaagcgtcgaaatgctacaataaatcaaagagtttaaaaaaggattgacaagcatgcctatgaagctgaaagcccagctgatggacgacgttaccgtaaagcgcgctttgacgcggctttcttatgaaatcattgaaaaaagccgcgacctcgaaaacgtggtgctcatcggcatcaaaacgcgcggtgtgccgcttgcggagcagattgcggcgaacattgagacgcacaccggtgtaaaggtgcaaacctgcacactggatattacattctaccgtgacgacctgacaaagcggcacgacctgccgactgtgaacacgcagacgcttccggtcgacctcaacgacaaggaagtcattttggtggacgatgtgctgtttacgggccgcacggtgcgcgcggcgatcgacgcggtgttccgtttcgggcggccggcgcgcattcggctggtcgttttggtcgaccgcgggcaccgcgagctgcccattcgccctgattttgtgggcaagaatatccccacctctctgcgcgagatcatcgccgtgcatttggaagctgtggacggcaagacgaacgtggaaatctacgagcaggacgagaacgaaccggaaatctgcgggcaatgacccgcttttagtgcaaaaatcaaattaaaagaaggtataaacatggctgtaattttggcaagcagttgccttttgggctgcgaatgccgctataagggcgacggctgcaagtgcgatgcgctcattaagcttgcagaaagcaacacgatcatcggcgtatgtcccgagcagatgggcggcctgcccacgccccgcgacccggcggagcggcagggtgacaaggtgatctcctgtgcaggcaaggacgtgacggaggagtacacaaaaggcgcggagacggcgctgtactttgcgaagctgaaccacgtggattttgccgtgatgaaggcgaaaagtccgtcctgcggcaagggactcatttacgatggcacgtttacgggcaacaagattcccggcaacggtgtaaccgtggagcttctgaacgcgaacggcatcccggtgtttacagaggacgaattggatcagctaccgctgtaaagtaaaacatcttaacacaaagaattaggcctgctgcgctttgcggcaggctttttgcttgaagatataaagaaaagctgtgtgtaaagttttattgctttacacacagcttttttgaattttatgtaatgctattttgctttacagcttacttctcgtcgaagaacgccttgaagcccttgtaggccatgtagacgtcgagcttggagacaacctcaaacggtgcatgcatggaaagcaccggcacaccgatgtcgagcacgtcgacattgaggttcgcgatgaactttgcgaccgtgccgccgccgccctgatcgaccttgccaagctcgccgatctgccaaagcacgcctgcatcgtcaaacgtgcggcggattttggcgacgaactctgcgttcgcgtcggacgtaccacccttgccgcgtgcgccggtgtacttggctatgcccagaccgccgttgatgtaagtggagttctgtgcctcgtaagcggaagcataatgcggatcatatgccgcggtgacatcggcggaaatgcaggtggacttggagagcacgtggcgcggctcttcaccctctgcctgcgcgaggtcagcgatgaagtaacgcatgtactcggagttgaggcccgtgttgccgtcgctgccggtctcttccttatcggtgagcacagtgacgacggtctgcaccgggttcttgcagttgaggatagcttcaagtgccgggtatgcgcaaacgcggtcatcgtggccgtaagcgccgacgaggctgcggtcaaagccgatatccaccgccttgaatgccgggacgaactcgatctctgcggagatgaggtcggcttctacgatgccgtacttctcgtttaagagacgcatgatgttcagcttatatgcatccttagcctcctcgtcgcgaaccgggcggctgccgatgaggatgttaaggtcttcgcctgtaaaggcagtacccagcggctttgtagcctgatcctgaccgaggtgcggcaaaatgtctgtgatggtgaactgcggatcgcccgcttcttcaccgatgcagaccttgatgactgtgccgtcgcttttcacgacaacgccgtgcatggcgagcggaatcgccgtccactggtactttttgatgccgccgtagtagtgcgttttgaggtacgccatctcggaggattcataaagcgggatgggctttaagtcgagacgcgggttatcgatgtgtgctgcggcaatgcgaacgccgtttttgcagccctctttacccatgatggcaaggcaaattgctttaccgcgattgttgtaatacactttgtcgcccgccgcatacttgtgcttcgggtcgaacggcacaaagccgtgcttttctgcagccgcgaccgcgtactcaacggattcgcgctcggttttggcgctgtttaaaaatgccttgtagccttcgcagaacttatctgctttttcaatcttctcatctgtgaccttgaaaaagccgttcttgcgcgggttgaggagcatttcggacagctcttttgcggatttttccgctgcttttttagccattttcaattcccccatacaatttttcgtaagtttctttatactgaaggactttctggacataaagacgcgtttcttcaaacggaatttcttttaaggtcactccgtcttcggaatatgcggggtccgaaagccacgacgtaacatttcccatgcctgcattgtaggcgcagaccgctgtggcgaggttgtcgtactcgtttaagagcacgcgcagcagcgcacagccgtatttgatgctgatttcggggtcgagcaaagcgcttgcgtcatattccccgccgatatgcgtttgcatccattcaaacgtttcgggcatcatctgcataagcccgagcgcgccgaccggggactccgcctcggggtcgaaatcgctttccgccttgatgacggcatagacaaggctttgcggcaagtcgtactccttcgcttcttttttgacgatggatccgtacttgcgcgggtaaagcatgtggtctacatcgggatgcagcctttgcaccgcgaaaacaacgagcacggcagctgcaatgccggcgataagaatccatggccacaagggcttctttttggacttttttaaatgtttgcttctcttattcaatcggattcaccggggtgtgcgcagccaagcactgcgagcatattatccatattgtccgccgaaacagcgacggtgttatcgagtgtgtaatcggagcggtcgatgtaaaaatcgtcgctctgctgggcgtgcatgcgcgtcagggcctcctgctccgtgagaccgtcgcggcggcagatacgcccaaggcgcacggtttcatccgcaagaacggagaccacgcggcggcaaaggcgatctgcaccggcttcaaacagcgtcggagcgtcgagcacgatgacctttgcatctttatatgcggcaatctcctttttgagacgcgctaagatcacgggatgcgtgatggcgttcagcttcgtcttgccctcttcgcttgcaaacgcgaggtttgcaagacggcggcgatctaaactgccgtcttcctttataatagcacggccgaacgcattttgcaactccgtaagacatgttcctgcataaagagacggatcgtgcgtaacggcgtcgcagtcgatgatgacgcagccgcgcgccttaagctgctttgcgaccgtcgatttgcccgcgccggtctgtcccgtaaggccgatgacgagctgctcgttcggcgttacgatgcggaacgcacaagcgcgaatgagacggttataaaccgcaaggcctacgccgcttttgcgcggcatacgggcgtaaacggtctttgcgccgatctcatcgaggtgatggagcgacgtgaaaagcccgtgcgcctgcgaaagggaatctgcggcgttgccgtagggcacgcaccggtttttgaggtacggcacgtcttcgttaaagcaaagtgcagctgcttcggggtgcgtatgcaaaaacgcggcgtagtcttcggcggaagcgtccaccatgtagacatccgctttcggcgcgtagtgcttgtatttcatgccgggcgaggcgaccttggcgttttccgcgggcttttccagcacggcgcggtccacgtctaccctgccgagcacgcggcgcagctgctccacggaaatgccgcccgggcgcagcacacgcggtacctcggtgacgacggtgataacggtggactccacgccgacctcgcagtcgccgccgttcacgatgccgtctacgcggcccatgagatcatcgcacacatgcgggaatgatgtggggctgggcaggccggagagattcgcggacggcgcggcaagcggcacgcctgcagcgttaatgatcgcccgcgcggtgggatcggacggcatgcggacggcaaccgtatcgagaccgccggtcgtctgcatcggcacaagcggcgattttttcatgatgatggtaagcgggcccggccaaaaggcatctgcaagctttttggcagcttcgggaatctcttcgacaagcgcaggcaattctttgatatccgcgatatgcacgatgagcggattatccgacgggcgacccttcactttgtagatctgtgcggagacggtagggtccaacgcattgccggcgaggccgtagacggtctccgtggggatggcgacaaggccgccgcggcgcagaatcttccccgcttcttttatatcctgttcgtttttttcatccaataatcgcgtatccattttcatccgttctccatgctctctttcaatttttcggcgcggtctgcggcgatgagtgcgtcaatgatttcatcgaggtcgccgtttaagacgtcgaacaggcggtagattgtcaggcctatacggtgatcggtcacgcgcagctgcgggtagttgtaggtgcggatgcgctccgaacggtcgccggtgccgacctgacttttgcggtttgcggcaatctcggcgttttgcgccgccaccttggcgtctaacagtcgggcacgcaggacgcgcagggctttatctttgtttttgtactggctgcgctcgtcctggcactcgacgaccgtgccggtgggcaggtgcgtaacacggatggcagacgacgttttgttgatgtgctgcccgcccgcgccgctggagcggaatgtgtcaatctttaaatctttcgggtcgatctcgagctcgacctcatcggcttccggcaaaacggcgaccgtagcggtgcttgtgtggatgcggccctgcgtttccgtttccggcacgcgctgcacgcggtgcacgccgctttcaaattttaatctggaatacgcgccgtcaccgtcgattgtgaagctgacttccttaaagccgccaagctccgtttcattcaggctgacaatctccgttttccagccgcgcttttcggcgtacatgttgtacatgcggtaaaggttataggcgaacagcgccgcttcctcgccgcctgcgccgccgcgaatttccacgataacactgcggtcgtcgttggggtcgcggggcaataataaaattttgagttcttccgagatgctttcgatatcgcttttggcggcgctcatctcgtcactcgccatttgacgcagctctttatcggcttcggagtcgtttaagatcgcttcggcatcctcgagcgacgcttcggctttttttaaggcgcggtatttttccacgatgggttcgatttctttgtgctccttcatgaggtcgcggtagagattgcggtctgccgcaacggcgggatcatagagcttcatattaagctcttcatatcggttttcaaaaaccgagagattttcaaacatagcaaagcttcctttcagacagatagttaaatgaaacggtctgagaggcgctactgctcgctgccggcactttcgcgcacgatcttgcgaatgttcttttcacacttgtggcggggcaccatgacttctctgccgcagccggtgcagcggattttaaaatccgcgccgatgcgcagcacttcaaacacgtttgtcccgcaggggtgctgctttttcatttgtaatttgtcgcctacccgaacatccatggtacagcctcctttatcgtgtattgggcgcgaatgctcccttgaaaattcagtatagcacaatgctgtattgatgtcaaagcaaaagaccgcctgcgcgggactttcccttgcagacggccttttcggtttctattttattccaaacgctttgtgaaaatgcttttacgctgcgatgtgaatgccgctcttcttcagcgcgaaactgagggcggtcgctacgccgtaagccgccgcaacggagacgatgtccttgacgagatacggcacggaggccacaaggaacgccgcccacgggccgttgccggagatcatgccgaactgaatcgtgccgcacagatggcaagccgcaagacccgcaacaccgagtacaatggcgagcacacggtgcggcatttttgtgccgagaccgcacagcgcagccatgggcaggaagccgtagatgtagccgcccgcgagaccgacaagcgaaccgaaaccgccggagaagtttgcaaacaccggcagaccgacagcgccgagcacgatatagacgagcacggcgagcgtgccgcgcttacagccgagtgcatagccacacagggcaaccgcgaaggtctgtaaggtgaccgggatgccgctcggcagcgggaacgaaatctgcgacaaaacggcgagcacggcggcgaatacgccgaccatgacgatattggtgattttctctctgttgctgttcatgttatttacccctattcatttcggaatacggcacactaagcagtttattcggctttcgggtttgcaaagcccttgtggatctgcacctcgcctgcggaaaacgcgcgctcctcgccgctatcgagacggacgagcaggtgcgcttcgtcgctgataccggtgacaacaccgcgatacgtctcctccccgagcgagaacgtgatggcgcggccggtgagaaatgaatggctgcggtacgattcgatgaacgcgttcgagccgaggttcttatacagcgcgaaaaagcgactgatgacggcagccgaaatgcggctgcgcatctccacggggcacgggccgtcgaaaatagcaccggcgatggagcgaatctcctccgggaagccctcttccggcacagcgatattgatgccgatgccgagcacggcccagttgagaccgccgttttcaaaatcaacggaagcttccgttaaaatgccgcagacctttttctcgttgaggtaaatgtcgttcacccatttgatttgcgggtttagccccgtgacctgctcaatggcttcgcacacggcgaccgctgcggtcgtcgtgatgaagagcgatttttcagcggtgcagtgcgggcggagcagcaggctgaaataaatacctgtacccggcggcgatgtgaagtgccgaccgagcctgcccttgcctgccgtctgcgattccgcaatgagcacggtgccctccggcgcgccctgctccgcctgtgcctttaaaagcgtattggtggaggtgacttcggtctgcacctgcaagtaaaccggcatatcggtatcgaggaaccgtgtgacactttgcacggtgagcacatcgctttccggcgccagcgtgtagccgcgctttggcacggcgcgaattttatgcccggcttcttcaagcttttggatggctttccacacggcattgcgggaaacgccgagcgacgacgcaagctgctcgccggagaggtattctccgcgatttttttcaagcgcgtctaaaactgcatcttgtatgcgcataaatttcctttccggcaaaaccggcagcgaaaatttcgtctaccagtttaccacacacaaagcgtttcgtcaacctaaaattaaaattaaggtgacgaataacaaaacaccgattgaatggaacaacaaaagcccgcacagcgcatggtgttgctctgtgcggacaaatatcccattacttctttttcttgaagccgtccttcagcgaaacggagcggttgaagacaaggtggtcttctgcggaatccttgttatccacgcagaaatagccctgacgcataaactggaagctctcgcccggctttgcggttttgaggcccgcttccaccttgcagcccgtgaggaccttgagggaatccgggtttaaaagctctaagaaatcgcctgcatccgggtcttccacagtaaagaggttatcgtagaggcgaatttcggcgtcttcggcgttcttcgcgtccacccagtggatcgtgctcttgatcttgcggccgtctgccgggttgccgccgcgggactcggggtcatactccgcatagacctcgatgacgttgccgttttcgtcctttttgcagccggtacatttgacaacataagtggtcttgaggcgcacttcatttcccgggaaaaggcggaaatagccctttacaggggtctccatgaagtcttcggcttcaatgtacagctcgcggccgaacgtgaccgtgcgggtaccgtcttcgggacggttcggattattctcgacctcgaacgtctcggtcctatcttcgggatagttcgtcaaaatgagctttacggggttcagaacgcccatgacgcgctttgccgtgaggttcaggtcttcgcgcaggcagtgctcgagaaagctgtattccacggtagagttcaccttggaaacaccgttgcgcacgctgaaattgcgaatggaggccggggtatagccgcggcggcgcaggccgcagatggtgggcattctcgggtcgtcccagccgctgacatagccgccttcgacgagtgcgcgcagcttgcgtttgctcatgacagtgttgttgatgccgaggcgggcaaactcgatctgacgcggctttgcgggcagcgtgacgttgttgataacccaatcgtacagcggacggtgatcctcaaattccaacgaacacagcgagtgcgtgatgtgctccatggcgtcctcgatggggtgcgcgaagtcgtacatcgggtagatgcaccatttggtaccggtgcgatggtgcggcatgtggttgatgcggtagatgaccgggtcgcgcatattgaagttgccggaagcgaggtcaatctttgcacggagcgtcattctgccgtcttcaaactcgccggcgcgcatgcgggcaaacaggccgagactctcctccatcggacggtcacggtacgggctctgcgccggggtggtgaggtcgccgcgcatttcacgcatctggtcaggcgtgagctcgcaaacataggcaaggccctttttgatgagctctacggcgccgttgtacatatcttcaaaataatcggaagcatagtagaagcggtcttcccaatcgtagccgagccaatgaatatcttccttgatggcatcgacgtactccacgtcttcctttgtggggttcgtgtcgtccatgcgcaggttgcagatgccgttaaagcgctctgcggtgccgaaatcgacgtagatcgccttggcgtggccgatgtgcaggtagccgttcggctccggcgggaaacgggtgtgcaccttcatgccttcgcagcggccgccctctgcgaggtcttctataataaaatcatcgataaaactgctgctgatctcctcggagaccgcttcgtttttgatctcttcactcataatttgtccatacctttcctaatatcaggtttttcctcttgctttatgcgttctcgatcttttgaaggccgagctgtaaacggcgcagcgcctcctctttgccgagcacggcgagaatttccatagcgccgccgggggtaacggtctggcctgccgccgcgatgcgtaccggccacagcagagtgccgtttttcacttcgaggctctgtgcgagggcaatgagtgcatcgtgaatggtatcaacctgccagttttcgatggcggacagcgtctcgatggcggcacgcagcatgacgggcgcgttctcgagcgttgccttgctctttttgtttatgaagaggtctgcggaatattccggcagctctttgaagaagccgagcaggctcgggatttccttaaacttcaaaatacgcggctgcaaaatggcgtcgagcacgtcgtacggcttttctgcgtcgccgaaaatctctttgtagtacggcatagccgcggtgcggaactcttccccgctcatcttgcggatgtattcgccgttgaaccacaggagcttatcgtaatcgaacacggcgggcgatttgctgatgccgtcgatggagaatgcttcttcgagctctttcagcgagaaaatttcctgattgtccttggggcaccagccgagcagcgcgatgtagttcgtgatgaccggcgcaaggtagccgtcttcgaggaggccctgaaagcttgtggaaccgtggcgcttcgaaagctttgagacggagccgtcttcatttttgcccatgatgagcggcaggtgcacataaatcggcttttcccagccgaacgcgtcgtagagcatgttgtacttcggtgtagaggtgaggtactcgcagccgcgcacgacgtgcgtaatgtgcatgaggtggtcgtcgatgacgtttgcaaagttgtaggtcgggtagccgtcggactttaaaagcacctgatcttcgatctctttgttttcaatcgtgatggtgccgtaaacggcgtcttcaaaggacgtggagccctcgagcggcacacgctgacgaatgacatacggcataccggcgtcgaggttcttctggatttcctctgcgggcaggtcgcggcaatgacggtcgtagccgccgaactcgccgtcttgatgaatggactcgaggcgctctttggtgcagaagcaatagtatgccttgccctcgcgcacaagctgctctgcgtagggtttataaatatccttgcgctcgctctgtacatacgggccgtattcgccgccgatgtccggtccttcgtcatgctgcagaccgacttgctgcagtgtattatatataacgtctgttgcgccttctacatagcgctcctgatctgtgtcttcaattctgagcacaaacgtgccgttttgggacttcgccaccagatactcgtacagcgccgttctgaggtttccgacgtgcatgaaaccggtggggctcggcgcaaagcgtgtgcgaaccattaaaacaacctccttggtttttcggtgcgttgctatccatgccgccggcatgaaagaatactacaccatcatataatgttctattatatatctgtgcgcaaaattttgcaataaaaaaacgggaaaaagcgccatctttttcccgttttctgttcttaattgcccttgaggaacgccacgtactcttcaaggcacatgttaagctcgttcatgcgctgcgcgtgctccttgccgacgtagcggtaatgccacggctcgtaatcgatgccggtgatgctctccttgcctttggggtagcgctcgacaaagccgtattctgcggcgtgctcctgcagccatgtataggcttccgtctcgcggaaatcgtcttcaacgtcgttgaaatcgaccgcaaggccggtgtgatgctcgctgtaccccggcgcctgaatggtgatccgcgcgtcttcatacgcgttttcataggtcatgccgtctgccatgcggcgctgcacggcgcgatccagcacgctttcctgctcctccacgctgcgatagcccgaggcaacccacaaattgatctcgtcgttatacgctgcattgataagcgccgtgagctccgggtacattttggagttgacggtgatggtatcgaacagcgtcggggtcatttggaaatcgtccggcagcggcacttcgctgttcacaagcacaagccgccaatcgccgagctgctgaaaggcagattcgggagtggaggtcgttttagaaagcacacttgctttgtctgaaatgttctccgcagcggtgctcggtgccgcttccggcgaggcagcagcttctatgggctctgcattttggtgcggcatggcaagcagcgctgtgatgataagcacagccgcaatgcaccctgccccaccaagcaaaagccgtgcacgcgatttcagtacacgtgcgggaatcctgttatgcttcttccgtttttgcggctgttttaatctgtaatgtccaccttgcggccccgccatgtgctttgccacgttcatgctcccttttctttcgtatcttctattgcaagtataccacataactggtatactaatccatagtttctaaattgttttttcatctttttttcattttaaaggagtgaccttgatgaaaaggatctttatgcgcggcaaccccggcgattttgcaaattatgtggcggcgctgacggcttgcggcgcggagccggtaatctcgatgacactttccgacgcagacacctgcgacggcctgctgatccccggcggcgccgatgtaaatcctgtgctctatgggcaggaaaacacggcgagcgaaggcatcgatgacagccgtgatgcagacgagattgcgcttgcaaaatgcttttttgcagcgggcaagccggtattcggcatttgcagagggcatcaggtgctgaacgtggcattcggcggcgatctcattcaggatgtgccggacccgcagcaccacatggcgacaaaagagaacggcgacgccattcacacggtacgcgcgcagcatgatctgatgcgcgaattttacggcgaagaattccccgtgaacagtgcacaccatcaggccgcaggtaagctcggcgcgggacttatccccctgtgcgtcagcgacgacggcatcaacgagggctttatccatgaaaatggcaaggtgatcggcgtgcagtttcacccggagcgcatcggctttgcgcaccgccgccccgatgcagtgaacggcgaaaagctgtttcgctattttctgagtctgatttaaagccgctttcctctattttccgcttccgcataaaattgtgaaaaaactgcttgctttttccccgggcatcgtgtataataaattcgttatccgggtgtagcgcagttttggtagcgcgcttgaatggggttcaagaggccgcaggttcaactcctgtcactcggaccataactggacaccaattttgatacgacacgtatcttgattggtgtccagttcctttattacagaggttttggtttccatgggtctttaccatacgatttaatcatcttttttcgcagaaatcttttccggcggaaaatattgcagagacctccgatgatgaatttagatgtttatttttaccatatatttgttctatcgaagataaagcagggatcataatgaagcaaaacaaaaacggattcacattgatggaaatgctaattgtcattgcaatcatcgccgtattgattgcagttgcaattccggtatttgcgtcacagcttgaaaaaaccagagaagcgacagatcttgcaaatgtccgctccgcttatgcacaggtgtccacagaggcgttgcttggagattccgaggctaccgtaaccgtcaacctaaaacagaagcaggccgactggcaatcattgggccctgtgaatatcggcggtatcgtccattacaaaaaccaaggagacacggataactggaaaggcgttgctgcaccaaacggaacctgtgtcgtatcgtataaggaagattacggaatcattctcacttggagcggaaaagccgacccatctacacctaaatacccgtttaacacaaacgagacggatttcttctcacttctatacaatacggatttttggaaaagcggcagcataaaaaccaatacaaactttgagtttgactccagatgttcggattcgcaatatgttccatccattatcacagcgattgataagctggataacagtcttttgcagcagcctgattgcacatgggcctatcttggcaacggaaaagatggacaagaagcaaatcggtatcttttctggacatctctgaacacggataaggtcggagccggaaataaaatccccgtaattattcaaaccggtgacggaaaatattatgtttccgaaaccacgaccggtaagcgaaacggcaagaactatgtcaccatctcggaatcgcttacgcggagccagtatcagcaaaccctgaaaaacggaaaagagttttcttcgttggaagcggcttacgatgcctatctcaaagcattgagtgaatccaaatacaattccgtacgccagtcccagtcttaaaatgctctattccgttacaacctctaaatcagcattctcagcaacttcatcaaatacaaaaagagacagcctaaagtgatatgcccccataccgggcgtccggtattgaggtacatatcaaagcagactgtctcttttttacttgattaattatgtagttatactgcctgcaagcggtatttttccgcgtaggtgccgtaggcgcggcggaagtcggggtcgtcggcacgcatggcgcgcagcgtttcgtgcagattaagaccgtggtttgccgcatccagaacacagccggcgatgttggagcagtggtcagccgttcgctcgagatccgtcagcaggtcggaccacacgaagcccgcttcaatactgcaatgaccctgctgcatgcgcagaatatggcgcgtgcgcatctgctccttcagtgcaacgatgacctgtttcagcggctctacctgtgcggcggccgcaaggtctttttcactgaacgcgcgctctgccgtattcaatatctcactcaccgcgccgatgagcaccttcagctctttttctgcggtggcgctgaagccaagtcccttgctgcgcagctcttccgacgccgcaagcaggttcacggcgtggtcggagatacgctcaaaatcgccgataatttttaataattcggtggcttcttcgctttcggcatcgctcagctgctgggcgctcaggcgcaccaggtatgtaccaagctcgtcttcgtagcggtcgcagcggctctcgttttcacggatggattccgcaagctccggcgaataattttcaaaggtcgtcagcgccatatgcagcgcttcgcctgcgcagcgtgccatttcgcccgcaacggcacggcagcggccgagcgcgacggacggtgtgatgagcagacgttcttcaagctcaacaggctgctctttgccgcccttatccggcacgatgcggattgcgagcttttcaagcaggccgcctgccggcagcagcatcgccgtgcacaggatattaaagagcgagtgcgcaatcgcgatgccggacatggtggcgttttcatccagaatagccggtgcgaacacaatctttacaatccagaaggccgtcagcaacacgaccacgccgataacgttgaacatcaaatggacaaccgccgcgcgctttgcgttcttctgtgtgcccacggaggagatcagcgccgtaacgcaggtaccgatattctggcccatgataatcgggatagccgccgcgtagctgacctgccccgttacggccaatgcctgcaaaatgcccacggaagctgagctggactggatgatacctgtcaaaagcgcgcccgcaagcacgccaagaatcggatttttgaacatcaggaacagtgaagcgaacgccgggacatctttaaggcccgaaaccgcgccgctcatggtttccatgccaaacatcaaggtcgcaaagccgagcaggatcatgccggtatctttctttttaccggatttgcagaacatatagaaaatgatgccgatgagcgccaaaacaggcgtgaaggatgacggctttaaaagattcacccaaatattgctgccgctgatgcccgcaaggctcaacagccacgccgtgacggtggtgcccacgttcgcgcccatgataacgttgatggcttgccgcagtgtcatgagcccggagtttacgaagcccactaccatgactgtcgtcgccgacgagctttgaatgatggctgtgatgccgaggcccgtcaaaaagcccgccggtacactgccggtcattttatcgagcaagctttgcagcttgccgcccgcgcggcgttccaaggcctgccccatcaggttcatgccgaacaggaaaagacacagcccgccgatcatcgtcagtacattgaaaatatccatacccgattttccccttttaacattcttttacacgtataggagtatatcgtgtctatgtcaaatcaactgtgtgttctttgtaaaatccatgtaaaatcgcttgttaaaaaacgacacaaagcatgaatatcccccggcgaaaagccggaggatatctacgctatgcgtcctgctgaattttgttttacacggtgccggtgataacaacctccgcggtgccgggtgtagcggcccatgtgccgttttcgttttgcgtatactgcgcggcaggaacggtgatctgccccggaagcgttgcgaacacgccggtcgtttcgccatacgtgtactgcgtacctgctgtccaagcggtgccgttaaacgtgaccgcaatgtttttgagaatcgggtcaaacgtatcggtcagcacgatgcgctcggcttcggaagcttcggtattgcccgtgttttcgatgacgaacgtatacgtaatctgcccgttccccgtgacgaccgcaggacacagcgctttgctgatggtgagcaccgcgcgatcctccgtggagaccgtttccgacgcgctgacttccagattgccgtccgtgacatttgcggtattcgtgatgctgccgtccgtgccgagcggtgcatacgctgtgacctctgcctcgtaaacgagcatgatgctgccgtttgcggggacgttcggaaccgtaatgacgagcggcggctccggcgttgcggtgggcgcggtctgcaagacgccgtttacataataccgaacagaattcagcacatacgcgagcggatagacggtcccgctattaaattcatacgcgccgaggttatcggtgaccgtgagatttgtcaccggctgcgcaccgctgtttacgatagaaatgatatacgtaatcttatcgtttgcggcgtaatttttcaccacggcggttttggtaacggtcaaggcttccaaaagctcgcccgtgacggtgttggaattcgttgtgcctccgttatatgaaagcgtcgcgaaatttgtaaaagatgccataaaacccctccttgttttcggggactttccccttgtacaagttatgccgaagggggtttaaatgacacttttgagcttgtggctttttgcattcttcatgtctattttaatagggtttcttacggctaaacagcccaccggactgttcagcctatcttcctgatctgttgtgaggcaaaaggatttcgagctctgcggaggtcgtgggcgagcccggcgtgctgcgcatgcagccggaactggtgcgtgcggcctgtaaacgcgcccatgcgctcgacaaatttctttaattttacataattcagtttacataaggttattgacataattagatttcgatccattaaaaatctcctttgaaaagcccataaaaccgggcttcaaaggagattttcgttttgttattggccgagcagcgaaagattatagtcttctatgcacgtcgcaaggccttcggcagttgtctcaaatccaccgccggcgtttttgagctttgcacaattcatccagaggttttcgccgccggacttttcctgcaaattgagcttcatgcctgttttttccataaacagttccgcaagcgcgtacatggagacatctgcctcgctgccgaagttatacgcgccaccgggcaagttcacagcctgcaaggtctgctctgcaacctcgcgcacataggtgatgccgcgaaattcctctttggaaagtgcaagcggcttttgggtgatggcggcgttcaggaacatcgtgataaggttgctgcggttcggcacgccgaacatgggcatgtcatacatccacgtcgcacgcagcatgacggcgttcgggtcgattgcgagaacgcggttttccatttccaacttctcttcggcgtagagatttgcggtcgcaacgtcgtcttccgtaaacggcttatcgccctttgcgccgctgtacacctgatcggagctgaacaacacgagcttcgcaccgtttgcggctttggctaaatactccggcaccaaaacgtttgcgtggtacgagccttccgggtctttggcgcacgcaccgatgtccgagattgccgcggtgtgaaggatggcgtccggctgcacggtgtcgatgaggcggtcgatatcctctttttccgccccgcgcagagacggcgcacaaataacgggcgccgccgcacggatgcgtgcccccacaaagccgtttgcgccggtcaacagaattttcatgataaactcccccctgtttttaaaaacgacccgacaaaactgccgggtcgtctggatgcaaaatgaattatgcgttttcggtctctttgtagcggcgtgcgcagtcctgcacgatggcgttcatcgcgtccattttattcagcatgtcctttgcaagggcaacctggcagcgcgtacggacaaggttatgctgcggctttttgaccttaaagtacttatcgccgacgatgtagtccgcgaggaagcgcgttgcaagctcacaggtaagcgcaaagcagctgagcgccagcgtatccacttcggttttcgtcagagacgcggcggtctttttgaggaagccctcggcaaatgcccagaaaatattgaggtttacgccggccttttccggatgatcgcaatcttcttccacaaaatttgcagcgaagcggatggcatcgccgaaatcgtggccgacaaggcccggcataacggtatcgagatcgatgacaacgagcgcctcgtgcgtcttctcatcaaacagcacattgttgatctttgtatcgttgtgcgtaacgcgcagcggaagctcgcctttttcaaagaggtcggtcaggcggcaagcctcgtcctctacggaaagcagccaatcgagttcttcgcgcacctctgccacacggccgcacgggtcggccgccatatcttccttcagcttctcatagcgcttgcgcgtgttgtggaagtccgggatcgtgtagaaaagggagttcgcatcgaaatccgccaacatcagttggaaatcgccgaacgcctcacctgcactgcgcaccacgttcaggtcgtcgcaggtatcgaacgtcacagacggcacgtagttgctgagtcgccagaagccgtcattatccatcaaatagttgacgccgtgcttcgtgtgatggaaatgcaggcttttcgtattcgggcatttttcgcggatgtgctccgtgacacggtcaatgttctgcatcagctcaatcgggtgctgaaacgcatatgtattgacgcgctgtacaaggaaagacttaatctttgccatgccggtaccgtcatcgcgaatataattgactttgtaggtgtggttcacgttgcccattttgatttcttcgtacgagaagaacgggccttcaatgcggaattcttcgccgacctcgagtaactttcgggcgatctccggattcatgtccatttctggaatactcataatcctctgctccttcaattttctggcagtttggccaccactttttaagcataaacataaagggataactataaagattatagcagaaatacggtaaatttcaagtcgaaattatgaataggcgcaaaaaggccgtttttcttcaaaaatgatatactgcaacacaaacaaaaaaggactctgcatctctgcaaagtccttcttggagctgctaaccagattcgaactggtgacctcgtccttaccaaggacggaaagaaatcagttttttcgcgggttttctgccttttttcagcatttgacaacttttttgactacccgcgctaaaacgccacaataacccgatacctctcatcaagcactttgccggcatcaccccgctcatcaagctgccaagcggtacgcgcagaaaacaagaacacatgcacgtggtcggtatgaacggcgacggcatagaccgccacagttgaaagcgttgtacttgtttgcttatcgtcgtatgaaagcaaaagcgtcgcattgtcgaggtcatttttaagcggcgtgtgccctacacgttcagtccaacggtcaaattttgttctaatctgctcttttgtcatagctacccctcttttgacatatcatagcagatttttgcaggtctgttcaagattttcttgacatttctttgttggttttatataatgctcttgtaaatctgtcaagcgccccgcggtcatcgttcttccgacccggggcgcggtttttataacaaaaaaggcgcagagcctgctcggagattccggcagccctgcttcttttccgccgggcaggcggtagttttgggtatgaaaaaagcacaccgccgaaaaatatcggcagcgtgctgattcaacaatgtttaatttatccgatcatcaacaggcggaaggtttcgcgtcctttcggcgtgatgagcgtttgtgtgccgctccactgggtcttttcgttgacacactctttgatctcgaacaagcctttgtttttcccctcgtagggaagcagcttgccctttttgtcgcggtagacgtatttcttcgccaacagaaaatccacaaacttctttggcggaacttcaagctgctttgcggtctctcggaagttcgtcagcgtgttccgctcgaccaactcgtcgaaatactccgctttcggtctggcgatctccaagtcaacggcaagcgctgcgttgctggcttccaaagctttgcgcttgtccgtctcgttcttcaaagccgtcacgacctgcagcaggtagtccgggttcagaatagccgcctgcaaggtctccgaggtcatgtacgccccgtgcttgcgaatggcaggcagcacctcaccggttacccatttgcggaacggctttgcttccggtttgtcgctgcgcaggatcacgttgtataagccgctttcgttgataacggtcatttcttgaacgccgccaagggtgtgaatttgactcatacccttttcatctgcatccagacgttctgccactcttgcagtcgtgccaaggtcaagcaccccgcacacatctttcaacacgaaccaaggttcgccgtcctgctgcaccgtacgaatttcgttttcccgatacttaaaagcctgcatctcgttcatactgccacaccttcttcctgcttcttgaccttcgtgaagaccgtgttgtacttctccgtcaagtcctttatacgatttttcaacataaggcacggcaaagtccacgcctctccgggaatgatagagctgctttccgtggttgcgacctctaatgcgcaaagcgtatcggtcaccatcagcagttcttcaatgatgtcgtccagctcaaagaattcacgtgcgatcataaataaaaacctccatcaaaatgtttgacagaagtccctatctgatgtagaatagatttcagatagagcttgctctgtcgtgtgcagaacatcgaaacgtattggttgtcagccctgtttcggtgttctgtttttttattttttaatttcttcttccaagcgtaaaatccctcgccgaatagcttcattttgatttacgttcttttgttcacaaaacttatcaaggatttgctttcctttttcatcaatacgaaccgtaatcttgtacggcttaggattatctgttggtcgccctgtccttgggctcatgttatcacctcacttttgtctgacataaatatatactattgtcggacaaaagtcaataggttttcaaaaaaatatttttgcaaagcaaaagcagccctgcgccttttgctttatgtatttacttttagaccttcttcacccagtcgagtgcgatccagccgccggctttgagacggccccagcctttattggaaccggggccactacgttcttcgacgattgtgtagcgcagcgtgtctttgatctggccctgcacgccgtagttcgtgcccggacccttgcggatgttcagcgggtcacggcagtttttgcggatgaggtatggcgtaaatgtactcgatgcgggttttttctccggctccatatatcctttcaccatgtttacgaatcgctgccagcctttgtcgagtgttctgtgcggacagtatttgccgtcgaagtcctgatgcttcttcagatgggacgtatcccaaccgcgttccttcaaaagctttgcgatatactctgcggcgttcttttcggctttatcgaaacgcgtgccgcccgaaagcgaatagcaaatctcgatgtgaatgccgtgcgcgttgccgtcgcgctgccccgcagcaaacgcacctctgttcagcgggataccaatgacgatttccttgtcatcgactgccgcgttaaacgacgtagagctgtcgttgcgaatcatatacgcgacttcattcgcggcggaagcatcgttcgccgtgttgtgcacgacgatatatttcatgtcctttgcgcaagattccaccggaactttcaagtcatatttgctcttgctgagtagattttctttaatcggtaccattatttttcctcctctttgcttactgtgttcttcaatctctccaacagtttagacagccgcggaaaccccggcacgccgatggccgcaaggttctccatgacggaaataagctcgttgatgatgagccagatcgcgaccagcaggccacagaaaagctcgatgtgcaggtcgatgcccgcctgcaccagggcgccgcgcagcagataatccacacccgcgccgaccgccaccatcgccatgtagcagagcttcttcaagatgcccttgacgccgatgcgcgagctgagctgcgccgtcatgtaggctttgaccatgccggtgatgtaatcgatcaccatcatgcacagcagcacgagcaccggcgcggccagctgcccgcagtatgccgcgacccccgcgccaacgactgtcgttacggatttaagtacagttgctttgttcatttatttcctccttatttttgataaaagctataatctacggtgccgaaagctatttcgccgccgcccagtgcaaaatatttgcccgtcgcatactcgggcagcccggccgcatttactgccgacgtattgtagatgtggcaaagtacaatgccgaccgaattaggatgctgcgtgccgatacacagtagcatatatttattcggataggctttgcacacccaaataagccactgcttaaagtattcggagccgcttgatccagtaagtcccagtgtgccataggtaacacgcggcacaaacacgattggattagatgacgcatcatcacgatttacgggagtatagctatcggcttgcaccgtgccccgaatccgcgtattccacgccacgtccagccagtttgcgagctcggccactttgccgatggccgcccctgcgctgcgcttgaaggattgcagcacactttttgtagacagagtgcgcgggatagataggctattatacttgtccgccaccgtcacgagcacgtcgtaggtggtggacgcgcctatatttccgccgccgatcacggttttgccgttgttggtaacgttcgccgcggtgccgtaactgctctcggattgctttttgtatcgagctgtaatgctcaaggtgttgccggtgattgcactgtaactcgcgttgatctccacggcaaaatacgtgcctgcctttttgcggttgccgtctgcatcgcagcggtacacgtcacacaccgctacgccgggctttgtgtagtctatgacgttgatcgcgcgcgtggtgctcgcttttcggccgcgcgaatccgtcaccgtggccgtgaatgtgatgttgcccgccgaggccagtgtgccggttgtcaatgcgccatttgtggccgtccatccgccgccggtaatcgtgtacgaggtgatgctgctgccgtatgcgccgtatgcgcccgaaagcgtcagctttgctttgcccatgccttttacgaatagacccgtgccgcttgtgtcttcggcgagcgctgccgaaagcgtgcccgctgacggaactacgctgccggggacggtgagcgtgatgcttacggacttcgtgccgaggagcgtgctgccggaatatgtatcgcaatagattgtaccgctgcccgccgtggcggacggtatttgatttgcgagcgacaccggcggcgtccagctcacgctgcttgcaattcccgtggcaatcgttccggatgcgccgccgaacgcgtagcgcagtgtgtgcctgtaggcactgtttaccgcaggtgtgttgatcgtcacgctcttgcccatctccacggtcgaggcacttaaactcggctgtgttgcaggctcctgccaattcacctcaagcgttacagccgtccatttgagataatccgtgtaagagctgccattgtagatgcagtacgtatcgtacccggcggcgatagatgccgccatgaaagcaacatcaaacgttttggtattattccacatgggcgctttacagctgccgagcgcattgccagtgcggtgccctgcgttgagcgaggttttaatgccgccctgtgaggcggagttgtagatgtataccgttttggtggtcgctgtgccgtagcccgtctgtccggtcgtcgcggtgagctttacgctgttgatgatcttgcccttgagcgctgcaaggcccggaaaatacaacacgccggtgcgcacacctgtgccgtcccactggctctgcgaggcggtgccctcgcttttccaaccccactcactgtcgtagtagttaagctgggctttatagctgtttctgcccatcagtcgtccccctcaaactcaagatcaaacgtgtcagcctccgcgttgtaccgccatgtgtacaggcccgtgtctgcgttgccgaaagacaagctgcccgtgatatgcgcatccgtgatataaagcatacggttggagatatacgcaacggtttgaccgttttcgacaaattccaatttgtcatttgagagcaccgcctgtatggcgctgtcgctgcggccgagcgtaattcgcgccccttcaaaacggatatactgctctaaaagccgctgattttctgccaccgtgccgtttgtgctgtcaatgagatttgtcacctgcgtaaagcgatattcgagctgatcgctccattgggtgatgagcagctgtttaacgctttcgagctcctctgtcgagactgcggtatcttgtaaacgccccagcgcgtcatacacgttttcggtggtggtcgtcagctcggtgcgggtctccgtcaccgatgccgtgatgctgtccatgtccttccgcgcgtcgaccttgtaatcggtaagctcctgctgtaccttgtctgtgcgcttgttggtctcgtcccgcacaagctcgagctgctcccctaagtctttccgtgcgtcgacttgctgctccgtcatcgtgcggtatgaggtgccgagcgtgtaggtcgcgtcccccggctcgtccaccggcaaatcgatctcggatacaagcatcgatatgggcgttgcgctgcccgggcccgaaaacaggatcatgtcgccgagcttaatgcgctcgacggaactatccacaaggtgcaaatctaccgcgtctacctcaatactgcctcgcaggtattttgccgcctctaagtcggcatagcccgcacgcaggagattttcggcgagcgtgatgtcattgtgcacgacgactttgtaaatccagccccatttttccaccgcgtccgcatcgtagatataatcttttccatcgtttgccgcagcgattgtaaggcgcggtgttaccgttcccaccttgtcctcgtcgagctgcgcgccgagtggaataatggccgtcgcaacgtcctcgccgcgcacggtgtgcagcatgtcaagcagattggtgcttgcggtgatccgctggctgtttacgttgccgtactccttgaggtaatccaaataccgtgtaccgtccgtgccgtagcgtatcacgagatagccgcccaggcggtcaaggagcttgtcttgcagcgcgtccatggtgctctcgtagtctgattgccggtactgttcgtcacggtgacttgtcccacggtaaagcgtcggctttcgtccacctgtgcgttatgcagctcgataagcttcgcaaagtatgccgccaccgtcatgtcatggtacaccgtcagcggctgcacgctgtcgttaaggtaagcgagctcgccctctatttcaacttttcgtgtgctgcgcaaatcccactcgtcgttgagcgcacgaccgcggaacaaaattgcatcatcctgccacagcgttaccaccgtatcgagttttgcgattttgtctgtgtgcgggtgcgtcagcgacaccgaaaaggtgagcagtccggctttgttcacggccgttttgcacgtcggcgaaatgaggtttaaatccggactgcgcggatcgtacagcgtgtaggtttcgccactgcggttttgcgccgtaatcttaaacaatcacagcaccccctcacgccaagtcaaaatgacgttgcccgtgccggtcacaacgacgttattttcgcccggcaaaagcagcaattcggggatttttacggccttgcccacctgcgcaatgctgtatgctgcgccgccgttgagcgccaccgtcatgcccgtttcggatgccgtaaaggtcggcgagacgatctcgtcgccgttgttgataactgccgtcgtgcccgcgccgcacaccgccgagctttcggtctgcgcatatttgtacgggtcacatgtggcggtgatttcaaacgtgcccgcaccgtattccttcacgcccggcgcacaggcgatacgacccaaataataatggtccgggtcatcgggcagcgtaatcggcaggcgtttgccatgcaccgcagacgcgatctgcgagcacaccgaaagccactccgatgccgaagcgccgcgccgcttgaacgtcagtttgagcgtgcgcggcctgtacaccgggcgccctgtgacgacctcggacaagtcgatgctgccgttttcgagcggcaactcctgatatttcgttttgacctccggcatttcaagcgagagatccgtcaagatcatgccgaagtccgtatacatatcgttttcgccgatgagcacgcccatcagaccactcccctttcacgcagaactgccgtgccgccctgccgcttgtccacttccggtgcaagtgcacgaccggcttcgcgtgggtcgaacaccgcgttcacctgcaactgtatccggccgatcgcgtccgccagcatcgctgcaagcttttcgtcgcgcggagagccgccggtgagcatctgcaaaatttcgcgcagaatcgtcaaaatggcgtgcagctccgtgacgggcatgccgtccgtttgctgcgcgtcatccacaaccgagcggatcatatccatcagcgttgcagcgcccgagacaacctcggggcccgcttcacccgcgccaagcagagagccgcccgccgctccgaagatcgtcggattattcagtagcatcggcgtgtccatagcttttttataccaagatatgccgaaatgcggcacacgcggcggcacaaggctaaagctgcccgtaatggagatgtgcggaagctttagccttggcaaactccaagagaaattgaaaaagctcttgatcttgtcgatcgcgttgcgcaccgcgtcccgcgccgcattgatcggcgtttcgataccctttttaatggcgttaaaaattgacgtgaccgtctctttggctgcctttatcgggttttcgatcgccgtttttaccgccgaaaacaccgccgtcaccttagatttaatcgcgtccaccaccgtgccgatcgtagattttatgccgttgatgatatttgaaacagaggatttgattgcattccaaatctgcgttgcaaagttaccaatcgctgtccatccgttattccaaaggtcagcgagcccgccgaggaatatttgtccggcattgagcagattttcgccgaatgcgctccagtcaccgttaagcgctgccgtgaacgcagagaacagtgacgaaatgacgcttgtcaccgtctcgaatactgtttgcacctgcgtccagatcgcattgaggaacgtgccgtccgtctgcgcttcgtccacaagccatttgatcgcgtccgcgatgccctgtatcgcactggcaatggtctgcgcaatcgttgcaagatatgttgccgcatactcccatacggcagaaaacaaacttgtgcccgactgattatccgcgaagaatgagccgaatagagaggataaaccctccaatgccatgccgattacattgcccaccgcgctgaaagcattctgcaccgctgtccatgcagcattgattgccgtgccgtctgtttgcgcctgttcaacaagccagccgagttggtcgccgaccgccagaaaagctgtaccgacaataccgcctacataaaccacagcgtctccgattgccgtacacactccggcgataatatcaccggcaactgatactgcgtctgcgataccgtcccagatgccgccccagtctatttccgcgttgctcaaagcgctgccaatcgtgccgattgcatcattgaccgcgcccaaaacagtctctatcgctttggcagcattatcaaaaacgtgcatgatgttatccgcaagcccctgcggcacattcagaccgcttacaaggatcgtctgtataccgctgagccccgactgcaacaatgccggtgccagctcgaccagactgcccgcaaacgccttcagcagtgatgcggcagccgacgccatactgggcagaatcgtcatcacgagctgcgggacggcctgtgcgaccacgggagccaagccctcgaccagactgccgataccgcctaaaatcgtttctacacgcggcagaatgttctttgcggctattcccacgctgtcgacaaagttatccatcagcccgccgaagtcctgtgtatcgtccgcaacgccgacgagcaggtttttccacgatgctttcatcatgccgacagagccctgaatggttgtactggcttcctttgccgtcgtgcctgtgatgcccatttccgtttgtacaatgtggatcgcttcggtgatgtccgcaaagctatctatcgacagatctgccatttcaccgtttgcctgcttcaccttgtttgcatcggcgataaggcgctccatttcctcttttgtgccgccgtagcccagcttgaggttatcgagcatcgtatagttctgcttggcgaatccctgataggcgttttgaatgtcctgcatattgctgcccattttattggcgttatcggacatatccacaagggcttggtcggcatattccgccgctttttttgtgtccttacccacgctttgcaaaagcgacgcggaaaagctcgtcactgtctccatgtactcgttggcggaaaggccggccgtctgaaatgctcggtttgcgttttgcagcactttgtccgacgcattgccgaacagcgtctccacaccgccgacaagctgctcataatccgcatacgcattcagcgccgacttaccgaccgccgccacagccgcagcagccgcaccgaatcccacggctgcggctttcgctgcggcggtaaacgccttgccgatagagcttgccgcagactttaatccgcccgcgagcgcgttgcccatcttctgccccgactctttgccgctcgtctcgactgccggggctaaactctttgagagctgcgcttgtataccctgcattgagggtacgatctgcacatacgcctttgcaatttcagttgccatttgtttcaccccctaaccgctgccatgcggctttaaagtcttccggcgtgcggtagcccgtcacttcgtcgtgcgtttgtggcacttccgtaaacgcgttcaaaagcgatttggggcggtttttgccggtctgcgccgcctgcgtctttgcccatgctaaaaaattaagcgcgtcagctatggacgccaaaagtaaggtgtccgtcgctgcacgcgctcccgataactttattttgattctcgaatcgtcccgtaagcccgccgcgagcgtcgccagcatgggcaccggcaacgcccgcaggtcaaacaccttgtaggtttccgccatgtcgcagatcagggcgctcttgtccttcgcgatcatgcgggcaaggacgatcagttttttcccgcgtctccgatcgcgtccatgacctcgcggatacagtccgaaacggctgtgatatgcactcggccgtcatcgccgcgcaggaagtcataaaggcgctttctctgctccttgccgaacagtatcgcgcagacgttggaaaacgccagcggattatcgttcacggtctccgccagcgcgtccacaaattccatatcctccagcacgctgccgtcaatttcaaactcgaagccgccgcttgtcttgcctttaatcatgatctacctccttatgccgctgccggcttgctcatatactcgtaatgcgtgttgcctgcgctgtccggcacggcggtcacggtgacctcgtagcctatggcgctttcgtccgcatacgtcacgtcgcccacctcagtgattgtgccgttcggaatgacgacgcgcttcaaaatgccgccgcgcataatcatgtcgataacccacacgccagcggcgagctccttgccgtttgctttgacggtcaagcccttttcaagatcgccggtgacgttctcatcgagatacaccgctttcagcacgtcgctgttaaggctttcgatgaaggtaaaagcaaacgtgtcggtcttctcgttctggtaggtcaacacgttgtcgccgccccacgctttgatgttgccgctttgcggagagttggagttcaccacgcctgcgtcggatgcgtagccgagatttttatacgcttcggtgagcgcggttttgacgtcggtcggcagcgccgtgccaagcggtgcgcggtagatcgcgccgcctactttcggcttgcctgtgcttacattggttgctgtgctcattattcatgctcctttcattcgtcgaaataaacgagatcgtacaccgcctggtagcggtatcgttttgtcgtcgtgtccgtaaaattgtaatcgctgttaagccgcgatgcgctgacggcatccagctccgcggcgctgtccatggcggctttcacgcgctcattgagccttgcggcttcatacatagacggcgcgtaggactggatcgccagcatcgcgcggtcaatatgctcctcacggcggctgcccgttttttcgagcaatacaaagcttttcggcgggtctgccggaacttccaacaccaccggcatcgaaagcttttccgcgagatagtttttaatgatgatctcaatcatgattatctcccgagggctttaagcaacatattttcgcgactgttttgctttgcggcttctgccgtttccgcaaatacgcccgctataactcggctgcttgcttggtacaaatctgtgctgtatccgcttccacaccgggcgcgtacctgttcggcttgctgtttcagcatttgtcccatttcttcggatttcaaaagctgccggataccgctgctgttcagctcaatttttactttatccatatcgctccaccttcacctttcggttccaccgcagcgggatcattgcttcgatgccctccgtcacgtcgccgtacgtgcgaaaacgctgcccgaagaactcaaccgtcacgtcgtgccagtcgtgcgtgtcgccttttggcagtgccagcgtgtacgcgagccgcttaccgtaaagctgcaattcgttcacaaggtcttccgctgtcggttcgccgacgagcacgttatgcaccgtctccgacacttcattaaacaccggcgcgccaaacgcgtcctcgccgttctgctgttttcggtacagtacaacatcaatcccgcgtatcatcgcataatccctccaaagggctgcgggcgccgatgcggtccccgacgccgagcagcttcttttcgagctttgagagatacagctcgcctgcgctgccgctgcccatcgtccagctctgggagtagcccatggcgctcacggagccctgcgtggagccgagcggataaagcggcgtgtcgttcccgccgccgtcgcccagaattcgccgcaccatgcggcaggaaacgagctttttgcggtctgcatccgccccggcgctatacgcgtcgatgatgaccgccgcttcctccaaaagggatacgcagcggtctttttcatcgtcgcttaaatttcggaaccccgccgcaacgtcctcagctgttgcgtacagcatcttagcccaccgcggtttcggtgcgcttaatgtacagcgtctgcggtttcgaaaccgtcagaccgtaaaccttacggccctgcaccgcactggcaccgatgaactttccggagccgttgaggtcctgcaaatgcacgggcacctgccactccatcacgcggtggcaccagttcgggtgaccggcgataaactccgtggtcgtctttttgctcgcgacgcgcgtcgtgctctcgaaatccatgttgttggactcaaacacgttaaagcccgcaatgcgaccgatcacgccctgctgcacgagcgtctgagagaggtctccctgcttgatataatgctcgtccagcatgaggacttcgaggtactccggcgacgcgatgaggaaacgaccgtcggcaggtacgcccttgcggctcagcacgcgctttgcttcgagcgcgagcttgtatgcggtggtctcggtcgcagctgtcttcgtggcgctgaccgttgcgccggaagcaccctcgagcgcgttgatagacgccttgtcgatcgagagcgccagcgaatagcctgcgctgtccagacgctccgccacgatgccgtccggcacgctcgcagcatcgaagccgtcgatgagctcgttcacggcctcatcatgatcgatggagagatcgatatacgtcgtcgagccgacggaagcatccacgccgttcgccttgttgtaggtcatcaccgccacctcggtgtcgcgtactgggatttttactttgcccgccttcgggtctccctcgtagcggttgttgaaaatgagattatcacgggtaacaagctggctgcgaagcttcgcgtctaccagagttgcccagcgttcctgatttgtgtgtgccataagatttctttcctttcgtaaacaaaattagattttcaaagacgggtttaaagcgccgaacgccgctgccacaccgtcgctttcggtgccgccgcgtgcgccgtgttcaccgccgtctttcacggcgggatagccgttcggcttcgcgaatttcaagattgcgttcgcctgcgcggtgcaggtttcttccgtgtcgccgctcaaaagctctgccggcacgccggtagcagcggagactttctgacgcaccgtgcgcagctgctccgcctttgtaaaagcatccacctgcttctgcaaagcgtccgccttctcattcgccttttgcagctcggtcttcccggcttcttccgccgcgtcgaacttcgccgctttcgctttcagcgcttcgtagtctgcgtatttgccgcgctccctcgtcagccggtcctgaatgatcgcgttcatttccgcctgcgtaaaggtgcgctgctcgttttcctgcgtttcggccgcagtgccgttcgtttcctggtttacagtttctgccattttggttctcctttccggcttttccgcagccgtcgcgtaattttaggtatgaaaaaagcagcctggcgcataagcgctaagctgctttatcaacggtgtttaatttttagaactctttgaattcaacgtaaatatccgtgtcactttttttccagagagaaaatacaaattttgcgttaggatacttcttttctaaaaagtctgcatcagtgttttgcacccaatcacgctcaaaagcatttacttcttgttttggaactaaccaaccgctaaagtcttcaccttccatcgttggtgtttcaaaatctcgtccttcgcccgcaaagccaaagaaaacacaaccaaagtcacgggctgtatcttgaaccaactgccaaaagcgattaaatttgagactttcttgcgttttcaacccgagcattcgttgtacctcctttcaaaatcgttacgaactcgccggaagaattctctataacaacatcattacctttcacatggaaaagcaccggatactcttgccctcgccactcaccgtaaaagcgttcgtccgcatcatttacaatggtgtatatgatttgcttcatttgctcacgggcttcagcgcttgacggatccatgccgaaatcagatgcgtgttttccgacttttttaccaaactgcgtatccgtcattttaagcaaatgcggttgataacgctctttggtcactggattgagtggcagtatatcaaaaattcccccaccatcggttttctttattttatcacttttcccctctgttgtcgagagctttttctcatttctcgccgcatacgccgcccgtttctgcgcgttgatgcgctcgcggttttcggcgtagtggatgcgcctcagctcgtttacgtcgcttccggcgtcgcggtaagccttgaggtatgcgtcggggtcgtaaccctccacgttcacctccgggtcaaaccgaatggcgtatgtacagtcgcagttcgcgtggatatgctccgcgtgcccgttttttatggctttcttactcgcccgctgccacccacgggaggccagcgtcatgcagaacgcgcaggtgtcgccgttcggcacccatgcaaattcggcgccgtcgcgcaaagcgtttttcagcatcgtgtcggctccggcacgctttacaaggcggctcaccccgcttttgagctgcggcgtgctggtttttgtcgcgttgaccatgcgtgccacttcgccgtactcggcggtctctgcgggctctgccgcaggcacgtgcgcgccctgaagctctgcgagcgcgtcatacatttcgcacgcaagcgttgcgctgccttcgccgtacttcgtcacaagcccatacgcaacatctatgagcttctggctgtcagaaacgccgtactgatctacatacgcctgcatacagtttgcaaccgtggtgtttaaccgacgcagcttgcctatgtaactaagccatgctttcgacggtatctgcttcatcattaagctccattaaaagctgctgtccgcgcacgcgctgctcttgcgacttgatacgccggatgtctgcctggtcaaagccgatcatctccaaaaacgtgtcggtgctcgcaaattcctgccgtgccgatgcgatcttgatcgctgcgtccgccgtcaccgccacgctcggcatcgccgggttcttaaagtgcgccatgatgccgctttcttcttccgtcagctcgtcaagcgtcttgttctgcgcaatggcctgcgccatgcacgcgatcgtccgcagcgcgtcaccgttgccggtgttgagctgctgggcgagcaaaacgagcgtctggctctgcgccaaaatcgcgtcgctgctcgtggggttcgcgtcgttgatgatgccgacatccgtcacagtcaagccggtcgccgccgcaaactgcgtggcggtcatgcgcatcttttccacatgcgggctcaaactgccctgcgcaagctgcccgaataccgggttttcgccggtctcggggttactggttgcggcaagcaagctgcccacgtactgcttaaatttatccgatacaatcgcgtcatactggtcgtccgtcacgcccaaaatgtacttctgcggggtcgtgtcaaactcaagcgcgatcgtcgcgtttgccactgtgcggatataatcgtcaattaaagtgcgaatgggctttttcagccgagagcgcccgaacggcttgccgctcgtcgcactccagatcatcggctccatcagcggacgacccatgcggtgcatcatgcgctgcacgcgccagccgtcgcgctcacggtgcagcaccagtaccgcatcggatgtgtacatgttgacgagcttcggcacccactcgttgctgtattcctcgtcctgtatcgtgtcgataatggcaagcccgcagtcgatgcgccccttttcgccgttccagagagctgcggcggtcgcaggcgaatgaaaccgtatcttgcagccgatgtttgcatcggcggaaagcattgcgaacacgcagccgtatttcagctcgtcgcggcacgccttgccgtactccgcgatgagcccgttatcccgcacaagcttactgagcccgtccaagctgcccgccgtgccgacaaatccgtcgaacatactgcgcgcggcgagcacgtccacggctttctgtccccagttgcatccgaccttcagcttgttcaacccctgcggcaaagcgattccgaggttcacgtcgctaagctcgatatgtccctcgtaatatttgtctttcgtgtcgttcttgtccttgtgataggcaaatacgttttgcagctcgatgagcttctgctgttcgtctgcgctcaagcccggcaccgtgccgatattcaaagttatcatcgtctcacctctatccaatcctcattttccgcgtcgggtctcgcttgcaggttttcgcaccccagagtgccagggcgcaggcttccacgggtaagctgttctcgccgccgaagccgtaccctccgccgattgggcgcttgaccgccgtcacggcgctttcgttcagcgcctcctgcggcttgtaccatgtcagcgtgttttcgttcacggcgtttgtaaacagccccactgccgcgagcacgtctttcacgcccgggcgtatgacggcgtttttcgcccgccaaacgcccttgatgcgatcaaccagcacatctacaccgttgcgcccgtcgatgacgacgcagctcgcgcggtcgtaccgggcggaaagccagtccaccagccaaacgagcccgcgccccgagggctgcatctcgatgagcgacacgcgcgccggtccctcctttgggatcaccgcgccgcataaacacaccgccgaaccgtccgcagcaaatttcacgccatatgcggttttgccttcgggcttttcctcattactcgcgcaggcttcccacgctctgcggtcaattgcatagtctaaattctccgccgctaccgggctccaccacccgaggcgttctcttgcaaacgtatccgggtccagctgctccgcttcgccctcaatggtcgaaaactgtatgcgccgcccgagtgccggatttgttgccgcccaacgctgcggggccgtcacgtcgccaatctccggcacggaaaactcaaaccatgctgtacgtttcgcctcaccgtccaatgcacgttgacgcaaattgcggaacaccgtgcccacagcatcggggcccggcggcgtgccgacgtaaacggtctgcgggtttaagctcgcagagatggcaggcagaaaagagccttgcgcggtctcgtccagctcctgcgcttcgtcaaaaatgagcaaatcgccgtgctgtccgcgtccgccgttgcgggttcgcgccaggaacttgatgcgtgcaccgcttttcagcacgatctgttcgcgcccgagcgctgttttgatctcggcaacataccgccgaagcttcgggtgctcgaagaaattgcgcatttcctcaaacgtctccgtcgcagtcttctgaaggtgcgccgtgtagatcacggtttcgttgaacatcagcatgccggcttccgcgcgtccctgtaccaaaagcgatttgccgttctggcgcggaacgctgccgcctgctgtgggcgctgcccatttgccggatggtgtgcggccgagccaatcatccatgatgtcgctttgccatgggtcgagcaccgtgccaccgacacgcagcagcttcaccgcgtccatgccgtcgcttgctgcatactcaggcgcgattctttcggacggctcctggcttcccatcggcttcgcggctcgtgaggatttcgctgatctcgtcgccatcggcgctcaccccctctatttcttcaatttctcgtattgtttcccggtactgcttcgccatagccggcagcgtttttgggtttatgcacgcatcaattgcggcagcgagcacttttgcaagctccttgagttgctctatccggctgccctttgccgtgatgctcttcattttcatgccactgccaccctttcaaaaataccctgtgtgtaaatcggcgctggacggcgatgggtcgccggcatgggcgcgaggggtaccctccccaccctcagcaaactcaccagtttccgtcgctgatttttggatatatctttttctctttcttttcctcgaacggatttcctactttcgcgcccttctgctgattgcaaaaataatgcgccgcttgcaggtttgtccagtcctccgccgcagaccgcgccgaagcgtagccgaactcccgccaacgtgctacgggtttgatttcatcgactacaaacgaaagcgggtgctgtgcgtcgctcggctcatcgtaatgtatcggaccgaaccgccctttacatatcccgcatggcgcgcccatggctttcagtctggcacggtgtttcctgcgcagtgtaccgttcgcatatcgcggattactcatcttcgcacctgtttgttaaatcgtccatacggctctccacgccgttttcactctcaacaggtgaaactaccatcgtaccgtctgaagccgccgtgtaggggcacacagagagcatacagaagcatgtgccgtctaagcattccgcccaaacgcatttgcagtccctcgggcacacccggtattctcttttcacgcgcacccctcctttccagtttcgggcataagaaaagcacccacgcaaaagcgcaggtgcctctttgttgtttacttacttgtacttgaattcctcgttcccggcgatttcatcgatgaaacgctgttgcacggtgacgatataatctttgctaacttcgtaatcggcgtaaatagtcattccctctgcttccgaaagcgctaagatcgagccgtctgcgaagaacccttctcgaagctttttgaagatctggttctcctctgtgccttcgacctcaaattcatacgtcccgccgaccggaagctgcttcagcgtttgcacaatacccggcatacacgcttcaagtccatcaaatgcagcattgcaggcatcccagaacatgtatcgttcttctatcttcccaatccgctccgccagcgctgcacagtctgcttgtggacagtgcatgttgattttctcggcaatctgctccaacagaagctccagaacaccggcatcacgcaggttcaatccctggtagaacgaaagcggcgccggaagctgccccttgtcctgcccggcatagcagaccggaataacctcaacgcctctcgcgccgccgaagccggtctcaaagttgatccacgggcgctgcacggacttcgcgctgcacagaaccagcatgatgtcgcagctttgaagcgcgttcgtgatgcggtccagccatcgcgcgccgtaggtgatgctcttttcgttcgaggagacgaacacctcaatcgcaccgaggaaagcgtgctcaaaaaaatctttcagcaggcttgcggcttctttttcttccgagatatgagaaataaataaaatcggctttttgtttccctttgccataatgcacctccgaggtcgtatagtgcaaattatacgcgctttgcaaaggcgtgtaaagagaaatcactctgcatcccgaatgatctcctcgacgagcggctcgcacttcgtcctgatttttcccataaacttcgggtcggcgaactcgtgcgtgaagatcgcgcgcccgagcagcttctcgcagaagcgatgcacgtccttaaaatcgtggaccagcaaaaagccggtgtaagcggataaaataacagcttctttgtgtgtcatagttgctccttgtagacttcctcaattatcattatagacgaacaaagcgaacaaaacgaacaaactcaaaattttttcgaaaaaattctgctgaattccattcgcagtgcatctgcggattttgaatcattcagcgctcgtctgaccacgttccacctcgtcccgtacttcataacacatcgggcgagcttctgagggcggtaggcaagcctgcccacaaacgcttcgacctccgccttttgcacttcaagttcccgaatgcgttctgcgtgtttcgggttcggcaagccccgcacggtaacgctgtgcaggttgaacgggaactcgtccgcgctcgcctgcaccacgtcgctgaccgccgcgctgtccttcgctttcagctcttcgatttccgcgcaaatgtcggggtattgctccaaaagttcttttgtcatcgcatctcctcctttccgttgccttacggtttcagctcaacttctggcagcacgttggtgttaaagtacagtttgtagtggtacgggtctgtatgcgtcccgctgatgtcctcaacaacgtacagggtgtaatcgttcaaatacacatagtttaccttgtagctgtcctcgcctacctttgccgtaacaaccagttcgtctgtgctattgttgctgatgttgatatatccctctatgtacatgatgacgttatccgtgcgggcattccatacagtcacacgccgttcggactggaaatattctgcctgctggctgatattgtggttcaccttgtcggcttcggagcaccctgtcgcggtgaacaaaaccataagcgccgttaacactgcaaaaatctttttgaacattgacttacctcctcaaaaatcacatcgccacaaacgccatcgctgcggcgaggcccactaagccaagcaccaccatagctttcacgcagtgctcaagcccggcgatattgtccgctgcgtcgtactcccgcgacttgcgcatcacgatgcactccgtgagcgtcgccacgattacgagtacgaccaagatgattttagtcactattctgcgcctcctctgtcccatctccatttttgccctctcgtgcagaccgtacagcgcaaatcatccattccgcacggattgctgtaaaggcatgtgtcacaatcccgctgccgctcgagcactttgtacgctgcttgatacagcttcgcggtttttatcgcctcccgaatcaccgcgcacccatgcacgccgcaattatgctcatgaccgcaaccgaggcagcacaaggagtctgccagcgagccggtctccgatttcatgcgctcaagcgccttgatgagttcatctgttgtcatatctgatcttcctttcgtgttttctttttaccgcctgctgcacatcacggtgaaagcctacttcgtccacagccttcatgcgctgtttgttcatcagcagccgcatcagcttgtaccgcatgtacgtctggcacccgttatggcagctcaccgaacgctgcggacaattttgcacacatggatttacttgcgccacaggctcacctcctgtatatttttctcgtgcaatgctccaccgggcatccacgcgggtgtcccgtgtcaaagcaatagcagcacgtattgtcacgccggtagatgcaaccacggcagcctgtgcggcgatgtcttacgtttgctgctgtgcttgtccgctttaccggatctggatcatacttctttacgttcatcgttttcaccctctctttcggtgccgcagatcgtcacccatacgctcggcatctccgatgaccatcgcttacagatcttcgcattcacgatctgcgcgtcgtctttgtacgcaatgccgttcaaggcatcgcacacgatcttcatcacattgtccaggtccggcttttttatcgggaaaagtgcgccgctcgtcatcagcatttgctttcgcttgctggcgctcttcggaatgcccagaaacgccgtgatgattatatctatcggtgcatcgtcggcgaatcgtctgccatgcgcttccgccaaaaagcgctggcgcacaagctcctcatacgccacggttttatcgggcgtgtagctcatgctgcgcccggatttcatccgcactacacgcggccgggctttgccctgcggttcgcccggtattataaatttgattttcatacttcacctttcgccttcgctgccgcgaagatatcatatttctcgtactcactaagatcataagacggttcgtgcttcggaggcttccaccgctcggataaactccagttaccgagtagagctctccagcttcgcaccggttgtccgttgatttcccagcctaacgtctcgtaataattccaaaatcgctccgggtcaacggtaaaacctttttcctcacaatacgccttaacttcagccaaagagggagccgcggcgcaagccgctctatgactctctctcttattcttctttcttacttctgtctcttgttgcatttctgcggtagaaattgggatttctgttgcagaaatgcgcttttctgtagcagaaataacattttggggtacagtttttaagagctgaccgtcatcgtcgatcaaccaatataaggatttatccaccttgttcctcgaggtcacatcggcgtagcgacgctggagtcccgcagaggttaccacagatcgcgcgaggaggcttttatcgaataagcctatatccgcacaatactggatgacttgcatcacctggtgttttttgacccatttgctgccgatcgacttcacgactgcgaggcacagtttatcgagcggcagctcaaggtaatatccctcacgatatatcatgcaaaggatgcaatcaaatatcgtgctgcctaaagggccgtgctcattgataaggtccatgaccttaaaatcctcataatagctgacatctttcttgaaccagtcgagcccctttttaggacgtcttccggccgttcggctcacctcctctaaaatacggtgaccggtatgccggtcagggcttcgatgtcgcgcctgaatgcgtccttgtcgccgttttgatttgatacatgcaataggtaaatacgctgcacggttgaaagatcgttggcggtaagaaatgttcggacattatcaagtgaaaagtgactgcgcacaaggcgcggccggagagactccggcacagacccagcgctgatattgcggtctaacaatgttcggtcgtaattgcattcgaccatgatataggtcagaccgcgaaatgtattcggaataaagtaagtatctgtcgcaaagatcagcttgtcccccgtctctttcgagtacaggaggaaacccagcggctccgcagcatcgtgctgcgcttcccacggcagcaccgtccacgtgccgagtgtaaactgctcacccgctttgatgctgtgtaggcggtagtttcggcggtctttctcggcgttcagcgcggaaaacgtccctcccgacgcgtaaacatcgatgcccgccatcggcaagccaagtgctgatttggcgtggtcttggtgctcatgtgtgataaggcacccctgcacacgcataagcaagtccatataccccgcgagtatcgttctctttcggatgccggcctcaagcagcaggacgctttttccgtcgtccacggcgtaactgtttcccgcgcttccggacgccaggcatttgaccgagatcatttaaaacccgggcacaaacggtgcctcttccggcatggcttctttgggcaccggcaacgcctccgggttaatcacttcgccggtgtcctcgtctacctggatgtcgatcatggttttgttggctttatcctgcatctcctgcacaggtgttttgcccttatcgtcgagtgcttcgaccctctgcatctccgtagaggtcgggccccatttgctgatgagctggcgtaggactgttttcattgccatcttgtcaaagtcggtctgccacgggctgtacttgctgttatagctcggcgagtagtgctccgcgtaagcctccatatccggcttgctcatgtaatagacgtgctcgtgcccattgagcaacttaaagtatgcaaaatagccgacaatcgtatccgagatgcgctcgccagaaatatccgggatgccggagagcttatcaaaaccgcgaagctcgccctcgtacaccacgtcggcattgatgactttatactgtccggtacgctgcgcaagctgtatgaggcccttgtatccgatcgtaaatgtcggcacatttttgtacggcacaacatacgcatagccgagagattttacaagcggcaagtcaagcgcggccgctttgacgcattccagcgccaccttttccgggtcacaattctggagcgccgtttcgccggaatacaggtcgatcatgctgctcataaactgccccgctttgtccttcagactgttcttcaactgggcgcgtatggtctgactgttcagcacgcccttaaactgatcgatttttgcaagattgttgttcatttgttgtttctccttttagtcgtcaagcattgtctgatattctgcatcgtccgggatgacaagctgcccgtattcatcgatcgccaccggcaaaaagtcattcagagccgctttgtcttcgacctgtatcgggtcaaatttatggtttgttttgtaggttacggcaaacaaggtccgcccgttgtgctgcgtcggcgcgaatgtgatcttcgcgttgacttcaaacccagtgcgattttccaacgctgtgcgcaacgcgcgaacgattttatcatcaatggcgtaaatgatattcttcagctcgccgctccagattgaaacgggtttgccggttaccggcacggtgatcgtttcgttatctttcaaatattcgctcatttgtctgcctccactttgatttttttgtgttctgccgcaacctgcaagcggatcgtttgatttttgatgttttccaatttcgtgcagctttccgcattatccacccagaccggtaaatgtaagcccatcgcttcggaaagcgccgcgatgatgtccaacccggcgttatactgccgcgcggtatttgtattgctctcgtatgcggtataaacgtcctctttgttgctctgcaccgttgctcggcaacacggtgcgataccgccgttgacctgtcggtcaaacataacccaacgcacacgcttaaaggctgcgttgatcttgtcttcaatgtccgccgcctgaagctgcacaaagcgttccgccaaggtaatgcgctgatccgcttcgacgagttggcgcccgagatatgtttcgtgcgctttcagctcctcgatgcgcttatcgagcgttttaatctgtgtttcggcagcggcgcgggtatctccggaagcgagttgtgcatttagctcgtccatgcgtttctgtactgcaaggtatctttcatccgttgtctgttcggcttttgtcagcctcgcctccaactctcggagctccgtatcgtatgccattgcatcgacggtggtctcccatgcgggcggtgtaacgatgcttgcagtcagactgcggagcatttcgttgtcggactgcaagtgcatttctatgtccttcagctctgccgcaaactcgtttacgcgctgcgccgtagatgcgcacagagctttcagttcaagcccctttttcgtgatctcatcgccgcgctgggctttacgcgtgttaaattcggccttcagatcctccaagcgttcctttgggaggatctgtccgcaggtcgggcagattgtttgatctgtcggaaactgctcattatggttatcgaccgcacgttttctgagctcgttgagttccttctcaaagctctctttcaaagagacattcgccttgtagtctctctcaagctgcatctgcttttcttttgcgcggcggatacgttctcggagcgtttccgcctgtcgggagatcgtcgtgctaccggacgtgctgtcttttatatatgctgccttcgcttcggcggctttggctttctgagcggcaatcctcgtacggattgccgctgcatccgcgttagatttcaatccttccagctcactgacaagcttcattttttctttcataagcgccgctgtgctgggtcgttcgctctccggcggcagatcaggtttgctgcgctcggcttcgtcgatgcgtgcggggatctcgttcagctcggcatttaattctcggcgttttgctttcgcctgacgcgccatgtcgtcaacggtcgtcattgcgccgatccacccgccgagcggggcaagctcttcgtgcgctttgatgatgtccgcgtcgctcaaatgcggggcaaaaacgtccagcagcaccgcgcggcgtgcgtcccacctcatgtctgtggcaaaataatggagctttccgagcaccaacagtttgttttccggggcgatatgttccgcgacaaacgccttaaattttgtttgcgtctccggcacgccgttgatgagatacgacgtcttgttgcccttgaacaccgattccacgtcgcccttacggcgggtaaactcgcgcttatatgtacgggtcaaggtaaatgtatcgccgttatcatcttcaaattctcctatgacggacgcttccacgccctccggggccccgtaaggataaacgtcaaaatccgtgctctgttcggcgtttttgccggtgagcagccaccagtaagcagttttcagcgtacttttgccgctgtcattcgcgccgaggaccatcaccgattgcccatggggcgtaaagtcaaacgtcttcacgcccataaagttttccagtttcaaactaagcagtttcatttccgttcccccttgacattctcaagaattttgtctatacttaaatcagagtgtttatccgactctttcgccgtttcgactgctgcaacagccgaagcggcatttttcttttgaatgagcttttcgtaaaggctctgggcgtcgtcgcgcaaatccgcgagatcgtcggcgagatcgctgtacagctccgtttcttcgctgttatccgcgacgttcatcgccgctttcaacgcgtctgccatgccgtcgaaggcggcttctactttgtgatacaggttcatgcgtttctttcctttctttttctgtactcattgatgttcacgatattcccgcacgaccgtgcggcttttcttttcctgcgctgcgcggcgacgagccggtcgatgacgatctggatcccgagcacggaccccacgaccgtcccgatcagcatcgcaaagccgagcagcttgactaagatcatataaaatcaccctttcttgaatacgtccatggtcagcggcgcccaacctgcgttcgccgtgcccggcgtcttgctgttggtctgtttgcgttggcgcggcacgtagaacggcttgcgcggctgcacggtctgggcttccaaaaagcgccggatgccgctttccgggatgcggaaaacattgctgagcttgatcgtgccgggaatcttcccttttctgataagccccataatcgtatcgcgcgagatgttcagtcgcgccatcacttcctgcagcgtgtaatactgctccatttttctactcctttcttttgttctctcccgcagccctcccacctgccgcccgttcaacgacaagaaaataatcacttcggcgcaaacaaaatgaaatcatgggaggtaagttccgggcggcatggggcaaggctgcggggtgggttaggtcaatttccttgtacatctccgtttcttgtggtaatatgaaagaaaaaggagatttttagtatgaatatagactttgccatcgagtttaaagatattttggctatgattataagccctatttttattgccataactacgcaatatctcattgaaagacatcctggaagttatgagcgcgaaagatatgaaaaggtcgtgttcccgatttttgataaactggaaactattctctacaagaaaaacctttctgatgaagatttaatacttgttaaagaatgccgtaaaattgtcgacaaaaatcgtatgattgccggaggacgcttgctgcattgctttgctcaagatgaaaagaccaatttcaaatcgatgtcgcggaaaattgacctcgaatacgatttatgtacgcggaaacttggattaccacttcgccctgttgactatcgactgaaccgttctcgtggtgtacaagtcttttttctgtctttgtacatatccagacttttggtctcatccggcgcccttattttctttgctttcatcgtctatcgcttactgcttcaaattctctgattacagcaattttcttaaaatcagaaacataataaagcttaaagcaataaactcgagtacatctaatagtcgatacatttcctcccctcctctcattctttatagttgatatttctcaacttttaggacaaaaaaagtagtatccgatttcctttgcatcgatgtccagaaggtcgcacagattatgaatctcactctgcttgaagttatattctcccgctaatttgcggttcaactgtccttcactgagcccaattttggcggcacattctttttgtgtcagcccgcattctcgaattttaccgcgaagcgggttgtagtttatctccggcatcagtctaacatccattgtctcaccttctttctgttgcggtatctcaactactcttttagtctacaccgcaagttgcgatttgtcaatagcaaattttgagatttcgcaattatttttgcaaaacatattgatttttcgcaacccaacgtttataatacaatcagacaccaccgaaaggatgatcgttaatgtctgataaagcagcctctttttcacagcgattgagagaagctcttgatgcaagaggaatgaaacaagttgagcttgcggagaaatctcaaatatcgaaatccagtatctcgcgttatctcaaaggggactgggaaggcaaacaaagcgcggtttatgcgctggcaaaggctttaggcgtgacggaagcatggctcatgggttatgacgttcctatggaagaaagctccaacgtcctccccgccgatgccgaaccgtataaaccgacaggttatatgaccgttctggggcgtgtggcggcagggctgccaatctacgctgaggagaatattgaggagtacatagcctgtgactttccgaactccgaagactatttcgcgcttaaagtaaaaggcgacagcatgaacgcggccggcatcaacgagggcgattacgttatcgtgcgcaagcaggatattgtagacaacggtgatattgccgtcgtgctggtaaacggcgatgaagccaccgtaaagcgcttctcgcgaacggataataccgttgtgctgacccctcaaagcatgaaccccgcacaccaagtgcaaatctatgacaccaaagatgttcctgttcgtgtgcttggcaaggtggtcgaatctcggcataaatactaaatttaggggaggatttttcaatgaaaggttcaagagaattcaagggaaatagtttattggaagatgtttccgactacgttgctatcgatttggaaacaacaggattagacccaatgtatgacgacattatagaatttggcgcagtaaaggtctccaacgggataattattgataaatttcaatctttaatcaatccggggtatgaaattagtccttttatagctactcttactggcatatcaaatgaaatgttagcatcggcaccttctcttgtaccaactttttcaaagttcattgaattcttgggcaattatactattgttgggcacaatgtaaacttcgacattaattttatttatgatgcttgtgttaacaatttaggtgttgctttttccaacaattttattgataccatgcgacttagtcgtcgcatatttccggaagaaaaacatcatagactatcagacgtatctaaacggttttcgattggagaaaacgtggaacatagagctttgtctgatgctatcaaagctcatgagtgctacgaaagcattaaaaaatttcttgcagaaagcaatatatcgttttcttctctttacccacatacaacttacaagcattcatctattcgtgcaaaagatattgttcctacaatagatgttcctcgtgataccagccctttttttaaaaagatttttgttttcacaggcacattagagcatagaacaagaaaagaggcaatgcaaatggttgtaaatcttggaggactatgcggtgacagagtaactaaacaaacagattttctcgttcttggaaatactgattattgtaagacaataaaagacggtaagagtagcaaacaaaagcgcgctgaacagttgaaattgtcaggttccaacatagagatattgtccgaaaacgcattttatgatatgatggattctgaaatattcaaccgagttggaggaagtatatgatcgaagaagtttttcaaacaataaagggctcaatcagcaaacagtattttggcaacagtaagttttactacaataaaagcgcaacaaccgggctatattcgcttatggtcgaatccactccaagtttatatcatttggacacaagtgctcatttatttgctcgggtaaagcttagtggaaaactgcagtatatatcttttagtggaacatttgaaaaagattttgctgcactgaatattccttttacgaaaatcgcatcagatgattttgttcgcattgatattgaatacttcttaaatattgcactcaataattctgctgtgcataaactacttaatcgcatatatacaagctcgtttagttttccgtcttttggttgttgcgcaaaatacgttgaatgcagtaatgcaggccattgcttgcatactgatattctatatgcgtcggctgcttgtcaatacaagcataatttagatgctggacgtatattttacgccacaaataaaagttaaagaaaaagccccgctgtggggcaaaaagttgaaaagagcaaaaattaacatgttccggtatattttactgcgaaagatgataaaatagccttaaattaacatcttacattggaatttcaattgtaaaatgataaatctcccttatatttgcatttattaggtggtagcagcagatgaaatatgactctttacaaaaactttttttcaaacagccgaatgactatcattctatatatcgcaatcgcttcaacagtgaatatgctgttcatctggactttgatattcacggttttccggcgttttatttacgcactccagagagcatagatttattgctcaacattcacaaaatggataaaaaggttcgcgaacttatacattcgcttccgggcattgctcaacatcaatttgcaaaacgctgtctgattgatgaagtagttttgacaaacagtatcgaaggcgtcaatagtaccagaagagacattacggacgtccttgaaagtctgaagacacaggataaaagaaaacgtttttctggactggtaaataaatatcttatgcttcgtgaaactgatgaattaagaatcaaaacttgtgaagacatacgtttaatttatgatgatcttgttttaaaagaggttgaagaggaagatcccaatgatctgcccgatggtcttctttttcgtaaaggttcggtgaatgtatacagcagtacccagaaaataatccacacaggtttgtacccggaaagcaaaattattcattatatgcaaaaagcccttgatttcttatctaatgatgaaattgagatgcttgaacgaatttcaatttttcattatctttttggctatattcaccctttttataatggcaacggtcgtctttcccgtttcatcagcagttatttactatctaaagagttaaactcgcttatcagctatcgcctttcgtacaccataaaagaaaacattcaattatattacaaagcctttattgtctgtaatgacgaaaaaagccgtggcgatttaaccccgtttcttcttagcttcctcgaaattgtgtctaaagccattgatcaactgtatgcagcgttacaaaaacgattagaaagtctaaaatctttcgccaagatggcagagcacattccttttatttcagaaagctctgaaatgaaaaacatcgcttatctgctaattcaagcagaattgttttctgaagatggaattaccacttcggaacttttggaagctacagaagtcacaccagcaactcttaggaaaagattatctaaattcagttcttatcaactgctcactcaggatcgcgtcggtcacaataaaacctatcgattaaacctgaaaaggcttatagaattagccgaacaatattccaaacaataaaaaagccccgccggtgctaccaacaccgacgaggccgcccggcgaaccgggtggacaatatagtcccgaacaaactatattgtaccacctgccccgggcaaaagcaatagcccgggcatttttatgcccaaaattagtcgttctcttttgagaacgtggatagaaacatgcccaaaaataggaataaagccactaaaaacaggaggtacatatgaaaaaacgagcagatgggcgctaccagcgcaagatcacgctgccggacggcacacaaaagcacgtctacggcacaagcccggcggaggtaaaccgcaaagccaaggaaatcgaacgcgccttcgagaccggcatagatctctcagaccgcacgaccgtcgcacagtgggcgataaaatgggtgcaggagtacaaaagcggcctgcgcgaaaacacgcagcgcagcatcctgcgcaatctgaacttacatattctgccggtgctcggcaacatgcggatgcaggacgtaaaagaggtgcactgccgcgcggtgatgaatccgatctccaagtattcggaagacctgcagcgcaaggtgctgaacatcctgcaccagcttttcaagacggccatcgcaaacggcattgtcgcgaagaaccctactgaaaacctggaaatcactccgcacgcgaagccggagaaccaaacacagtttttgaccaccgagcagcagagagagcttctctcgcgcgtcacagagccccgtgcgcgggcgttctgcgcgctgatgttattctgtggcctgcggcgcgaagaagcgctgggcgttctctggacggacatagagggcaacaagctccacgttcggcgcagcctcaccttccccgtcaatcagcccgatgaaaatcgtgagttgaaaacgaccaaggcgaaccgcgcgattcccattccgcagcgcttgaaagacattctggacgaaaccccaaagaccgccttgcagatcgtaccgaacgcacacggacaagaaatgaccctaagcgcattccaacgtctatgggcacatgtggagaaatccgtcggcttccacgtttatccgtacatgctgcggcacagctatgcgtctaccctctaccgcctgggtgtcggcgtcaagcaagcacagtaccttatgggtcacaaggacgtgcggacgaccctcaacatctacacccatcttgaaaacagcgacctgcgagacgctacggaaaagctgaccgccctgtgcctgtgaccgcccgaaaatctgactactttttgactacctgacccctttaaaaaggccttaaaaaaccgatattcagaaaataaaaaatccagtgtcaaaaccaaaaaacggcttaaacactggacttttcttggagctgctaaccagattcgaactggtgacctcgtccttaccaaggacgtgctctgcctactgagccatagcagcatacgcaaaaggcaagatgaactcgccttttgtggcgacccggaacgggctcgaaccgtcgacctctagcgtgacaggctagcgttctaaccaactgaactaccgggccatggtggcaggggcagtaagattcgaactcacggcacgcggttttggagaccgctgctctaccaactgagctatgcccctatttatctcgcggcctcttttcgaccgctcgattattctaccacgaactacggaaaatgtcaacctattttcccaaaaataattattttttacccccgacaaggtgctttatgcaaaaaatgcagacaccgtgccgaaaaacaggaaacgcccgtccttttagaacaggcgtttcggtgacttaactttagcgggaaagatcctgagaaatcctgtagagcttctcgtcgaagacgcgcggcatctcgagggcttcggtaatgtcgaagtctacgatgcgttcgccctgcatgacgacgacgcggttgctcttgccgtcgcggagcagctcaactgcgtggtaacccatctggcttgccacaacacggtcacggagcgtcggggaaccgccgcgctgtacatggccaaggatggtcgcacggctctcgatgccggtctcctcttggatgcgcttgcagatatcttcggagtgacctacgccctctgcaacgaccacgatgaagtggcgcttgccggtcttctgtgcgtagcggatgcgctcgatgatgtccttttcaaagtcatacttcacttccgggacgagcgttgcgattgcaccgacagcgattccggtgttgagtgcgatgtcgccacagcgtctgcccatgacctctacaacgctgcagcggtcgtgagactctgtggtatcgcggatgcggtcgatcatttccatagcggtgttcatcgccgtgtcataaccgatggtatattcggagctcgaaatatcgttatcgatggtgcccggaacgccgatgcaaggaacgcctgcgccggtcaggtcgcgtgcgccgcggaaagaaccgtcgccgccgacaacaaccacgccgtcgatgcccagttcgcgacatttagcagccgccttctgaacgccctccggggtattgaactcggggctgcgcgccgtaaagagcgctgtgccgccgtgctggatgatgttggaaacgctgcgaagctccattttctgcacttcgccggtcagaagaccgttgtagccgtgacgtacgccatatacctccatgccgaaggagatcgcggtgcggacaacagcacgaaccgcagcattcatgcccggtgcgtcaccgccgctcgtaagtactgcgattttctttgcacacattgtaaattcctccactttcttattgaaaattgcaaagttaaaaatgcaattcagcaatttattccattcatttttgattataccccttttccctgacggtttcaagaggtattttgtcttttttgaatcggtttttgtttttttgagaatttcttattctttcagcgcaacatttccctcgccgagaagttttttcaatgcggagacgagctcgtagttcaccgcaacgcggtaacgggcgggcgcgcggaccagctttttcgtgtccgtataatatagatagaggtcggtcacgccgtcgaaaatctcgatgtactgcatcgcctttttgcagagcgggtcttcggcgttcggtacacgcaggtaaaggcccttataggctgtgttatagcccttaatctgcacaccgggccgctctttcccgcgcggcggcgtgacgctttccggcacagcggcaggcttttgcgagtcccttttcttttcctcaggcgcagaccttctgcagatcatcatttcttccggtgaaaacggtgccgaggcatattcgcagatgaacttcgggtctttttcttccgtaaagctgatgcgtccgtgcgcccaaacagagccgcccggcgcaaaaaggtcgccgtatttttccaaaactttcgggaaaacaagcgcctccatagagccgtacatgtcttccagcgtgacgaacgccatggcagagccggagcgcgtcaccttctttttcacgctttccacaacggccagaacgtccacatactgctcgtctttatattggtcagattccccggcggcgctgcgggcaatctcatcaaagcgcgcggcgataccggcgttatagacctccgcatacggcgacatggggtgcccggaaaggtacatgccggtgacttccttttccatagaaagcagttcggttttggggaactcctcggctttcggcatctcgaaagattccgttttctcctccccgccgaaatcaaacaggccgatctgtccctctatgttgcggcgtttgtcgtcctccagctgatcgagcagcgggccgaccgccatcagcatttcgcggcggttgttgccgagaccgtcgaacgcaccgcagcggataagactttctacggcgcggcggttcagatctctgccctgcatgcgcttgcagaaatcgtagaaggtcgtgaacgggccgttcatcgtgcgctcggacaaaatgcgctgtatcaggccgcgtccgaggttgcggatggcgagcaaaccgaaacgaatgctgttttcaaaaacggaaaagccccgctcgctctcgttcacgtgcggcggcagcacggcaatattcagcctgctgcattcttccatatacgccgcaatcttgcctgcggatgcgagcacacttgtgagcaacgcggccatatattctttcggatagtgatatttgaggtacgccgtgcgatacgccacaacggcatacgcggcggcatgggacttattgaacgcgtaggacgcgaagcttttcatctcatcgtagattgtctcggcggtctgctcgtccacgccgcgggcgatgcagccttcaatctccacggtgccatcctcacgctttaagccgtgaatgaaatactcgcgctcctgctccatgacgtcgtgctttttcttgctcatggcgcggcgcacaatgtctgcgcggccgagcgaataccccgcaagctcgcggaaaatgcgcatgacctgctcctgataaatgatgcacccgtaggtgacatccagtattttggaaaggcgcgggtggcggtacgtgattttatccgggtgcttgcgattttcgacgtacatggggatgaacttcatcgggccggggcgatacaaagagataacggcgatgagatcttcaatgcttttggggtcggattgcatgatgacacggcgcataccggcagattcaaactgaaacacgccctctgtcgcaccgctcgcgatcattttaaacacgtccgggtcgttatccggcgcgttttccaccttaaagcccggcgtgtgtttcgcaatcatctgctcggcgtggtcgataaccgagaggttgcgcaggccaagaaagtccatcttgagcagaccgagctgctcgatggccgtcatcgtgtactgcgtgacgggcgaatcgtcgttcatgctcagcggcacgtaatcgacgaccgggcggtctgtgatgacaacaccggcggcgtgcgtggacgtgtggcgcggcatgccctcaattttgcgtgccatgtcgaggagctcgtgcacctgtttgtcgctttcatataaatcgcgcagctcggagacgcgttccagcgcggcatcaatcgtgatgtcgagctccatcggcacaagctttgcgacggtatcgcacgttgtgtacggaatcgccatggcgcggccaacgtcgcgtatcgcaaggcgcgccgccatggtgccgaacgtgacgatctgtgccacatggtcggcgccgtatttttccgtgacatactcaatgatctcctgtcggcgctcgtcgctgaaatcgacgtcgaagtccggcatactgacgcgctccggattcaaaaagcgctcgaacagcaggtcataccgcagcgggtcaacgcccgtgatgccgatacagtatgcggcgaggctgcccacgccggagcctctgcccgggccgaccggaatgcccatgcttttcgcctgacggatgaaatcgtacacaatgaggtagtagtttacataacccatcgtatcaatcgtcgaaatttcatattcaaggcggtctacgatttcttttttcgggttttcgccgtagtatttgtgcagccccgcgtaacacatgcggcggaaatattcgcggttgtcgctgccgtccggcgtatcaaagcgcggcagcttcgttttaccgaactcaaattccacattgcagcggtcggcgattttctgcgtgttgtccgctgcctcgggacaatccgggaacagtgcgcgcatttcgtcttcgcttttaaaatagaattcatcggagccgaattccagtgtatcctcatcctccaccgtgcggttcgtctggatgcagacgaggatgtggtgcattttggtgtcttctttttcgatatagtggcagtcgttcgtcacgacgagcggaatgcccgtatcttttgacaatcggattatttgcgggttgatatgtgcctgttcgcgcaggccgtggtcttgtaattcaaggtaaaaattgtcctcgccgaaaatctcacggtagcgcatggcggcggcttttgcttcgtcatagtcgccgacggagagcgcacgcgggatttcacccgcaaggcaggcggaaagcgcgatgagcccctcgctgtgttcacgcagcagctccatatcggcacggggcttgctgtaaaagccctctgtccacgctttagagacaatggcgacaaggttgcggtagcccgtttcgtttttgcacagcagcacaagatgccggttttcgttatcgatgccgtgaattttatcgaaccggctgcgctttgcaacgtagatctcgcagccgatgatcggcttgatgccgcgctttttcgctgctttataaaagtcgatcacgccgtacatcacgccgtgatcggtaatggcaacgcttttctgccccatctcctgcgctttatcgagcagcttttcaatgcggcaagcgccgtccaaaaggctgtattcggtgtgcacatgcaaatgtgtaaacgccattttcgccctccttttccatataagtttacataattgaacttacataaacctctaatttttgttttcaatcacaagggtaaatccgtgctcggtggaaaaatagtggtttttatctccccacgcggtatcgatcacaacgtagtatgtgccgtcgttttcagggtacgcaaaccgctcgctgcggtagtaaagctcggagaaatcctcgttataaaccgtgtaatacatcgcgccgtagggatcctgcgaggcttcaagcacgatgcctttatccatgcgaatgaccgggaattcatcggcaacctcttcaatttcaaaatgccctccgcacgcttttgaaccgttcttgctttgctcgccggtcacgttctgcagcgcggtaatctcttcattgccggagcgcaccacgatatcgccgggcacaagctcggctttcagcgcatcggcgatgaaatacgcgcccacgccgagcaccgcaacaatcaaaatacccaacacaagatctttaaagctcttcggcctttgcattttcagcatgcagcttttcctccacttcaaaaatgctctgctccgcaagggattcctccggcgagccgagctgttccgcaaactccaaaatgcggcgcaggcggtgattcacaccggaacggctgatggaaagccgctcccccatttcgcgcagcgacatttcggggttttccagccgcaaaacggcggcctcgcgcaggtcggcgggcagctcgtccagccccaccttgtcgctgatgagcgcaatagcggcaatctgctttgttgcagcagagtacgttttatcaagattcgcggtctcgcagttcgagacacggtttaaattgttgtaggtctccttgtacattttaatctgcatcaggttcatggcggaatttaccgcgcccgtcagcgtgaggaaatcctcaatggcagcgctttcctttatgtagacaatgtagctgttttttctgcgtgcaatagacggcgaaagctgtgcggccttcacgcggtgcagaacggccacaaggtcttccgcaaggtgcaggtacggcgtggaaaactcaaggtggtactccttctgcgggtctgtgaccgtgccgcagatgaggaacacaccgcgcaaaaacgccgaaatgcagcagtccttttgcagattttcctcgtgaatatgcaggttcacgtcattctcatcgtgcccgaacgaacgaatcatctgaatacgcgcggcttcacccggaatggtgatggcatacgcgccgatattcttgcgtcttaactgcgagcgcacctcggcgtatacaccggccgaaacagcagcggcctccgccacacggcgtgcaacggcggcattttcgcataccatctgcgattcccgcgcggaaaaacactttgaaaaaagcagaaggccgtagcattccgctttcaaacagcacgcgcgcttattttcaatcatacacagctcttgcttgcaatccgcagcaaatgacatgaaaacggctccctcccgctttattttttcgtgatatcccggtgcgagaccgtggcatgaatgccgtttgcggcaaggtgatcgtgcatatactgcgcaagcgccacggagcggtgatgcccgccggtgcatccgaccgcgatgacgagctggcttttgccctcctgaatgtagagcggcagcatgtaatcgatcatgtccgtaaagcgggttttaaagccctcggtttccttgcagttcatcacgtagtcgcgcacgggcgcttcaagcccggtatgttcacgcagctcctccacgtagaacgggttcggcaggcagcgcacgtcaaacacaaggtcggattcaagcggcagaccgtatttaaagccgaagctgatgcaatgcaccgtaatggcgtcgttgtcgttctgcaaaaacaggtcggaaatgcgcgctttcagccccgccgccggaatgttcgacgtatcgatgacgtaatcggagacctctttgaccgggcgcagcatctcgcgctccagacgcacggcctgctccaaagagccctgcatcacttcggaaagcgggtgcttacggcgcgtctcctgaaaacggttgacgagcacggactcggacgcatccataaacaaaattttatacggcttattttgcgccttcagtgtttcgagcgcgctgaaaaacgacttaaaaagctcgccgccgcgggtatccgtgacgaccgccacgcggcgctgaataccctcggatttatcgcaaagatcgtaaaagaccggaatgagcgccgggggcagattatcgacacaataaaagccgatatcctccatggcgtgcatagcgcgcgttttgcccgcgccggataagccggtcaagatcacaaattccattttaaaaaccaccttttcggcagccgaatgccaccgtaaatcccacaaattttactcgctgagcgaaatgcggcgaatttccggctccagctccacgccggtcgcctgaaaaactgtatcctgaatggcgcggatgagcgcttccacatcggcacacgtcgcaccgcctttgttcacaatgaagcctgcatgcttttcgctgacgcacgcgccgcccacggcaaagcccttcaggccgcactgttcaatgagcgcaccggcaaaatagccctccgggcgcttgaatacgctgcccgcgctcggcagctcgagcggctgcttttcgcggcgacggcgcatgaaatcttccattttcgcggtgatctccgcttccgcaccgctttcaaggcgcagctccgcgcttgtgatgatgcgcttcgtgcccataaaggcgcttttgcggtagccaaacgcgaggtcttccccgctcattacgccgggcgtgccgtccgcttcaaggaaatggacgcgttcgacgacctgtttcatctcgccgccgtaggcgccggcgttcatgtacactgcgccgccgagctgccccggaatgccccacgcaaactcaaggcccgtaagcccctgcccacgtgcaaagctgcataccgtcgcaagcgatgcacccgcgccgcacaaaacatgaccgcttgcaaggatctgcacttttttaaaatcgccctgcagcgtcagcaccgcgccgcgcaagccctcgtccggcacaagcagattggaaccattgccgaggatgaaatacgggacattctcgtcgcttacagcatttaaagccgcctgcaattcagagacggtcttcacttcgacaaaccgatccgccgggccgccgatcttaaacgacgtgtgggcggacatgggctcatcggtcttatagcatacgccggcactttgtagtgcggcgtcaaatttacggtaatcagacattctcaaagctccttaaaatagcatcggcatccttgcggttttcaaggatgttcgtgtgcgcgcgcagatactcgatgaggcgattcgtgttcgcgttgagaatcagctcctccggaaactcaatctcgcgcagcatctcgagcgccgcagtgtgatccttcacctgtgtctcaaaatgcgcgtccgagttgacgataaccggcacacggtgctttttgcagcacagcgcaatctcgcggcagttcgggatattcgccttgcgcacctcaaaggaatgcgagttaatctccacaagcttgtggtttcgaccgaactccggaatgaccgtttcataatcgtagcagaactccggactgccgctgtggccgatgacattcaccttcggatcgtgtgcaatgttgagccaaagctgcgtgcatttttcgaccgtgggattctcaagccccggcagtccaaggttgtgaatggacgccacaagccagttgacgtcgcggcgttcggtctcattgatgtcgagcgtgccgttcaaatcgatgacattcgcctccatgcccgcaatgaacagaatgccgcggtataaaagcggcagttcatgcatggaattaaagaaccacgggccgggcgcaccgggcatggtgcgggcgtggtcggtgatggcaatggctttgagacccttttccgcagcggaatcgaccatttcgcgaatggtgctgtacgcatgcgtagacgccagcgaatgtgtatgcaaatctgcaatgatgttatacatgatgatgttttctcactttcagctaaccttaaacgcggttaaaagtctttgatgaaacttttttcaggaagtttacaggttcttagggcagcgccctaagccgctttccgcaaaaagcgaaacccttttgcctaccaaaagatcaggaaggctgttaaatatccaaatctctcttaatctcctcgtgcggcatcatggaagcatccatgccgagcgcagagagcagctcgtaggcggcgttgtagcccattttcttctggcggttgttcatcgccgcaacttcaatgatgatggcaaggttacggccgggctttaccgggatcgtcatcaccggcaccttgatgccgagaatttccgtgtattcgctgtccatgcccatgcggtcgtagaccttcgttgcgtcccagatctccaggttgatgcacatgtcaatcttttcctgcagcttaacggcgcccataccgaaaatgcgacgggcgttgatgatgccgatgccgcgcagctcgatgaagtggcggatgttctccggggactgaccgacgagtgatttgctggatacgcggcgaatttccaccgcatcgtccgcgatgagacggtggccgcgcttgatgagctcaatggccgtctcgctcttgccgacgccgctgtcgccgacaagcagaataccttcgccgtaaacctccaccaaaacgccgtgacgtgtgatgcgcggcgcaagctcgacgttcaaatacgcaacgagcgacgcgacaacatttgaggtcgactccgtcgtgcgcagcaccggcacgtggtacgtttcggcaatctccatgaaatccttgccggggtcaataccgcgggaaacaatcactgccggcggcttcagggacaggtagctatccagcgccatggcgcggcgctccggctttaagctctccagcatgtacatttccgcacggcctaaaacggcgatacgattcgggtcaaaatattcgtggtagccgttcagctccataccggggcgaacaacgtctctcgattgaatcaaaatatcatcggcgctcttcggcagaaaagcggtctcaagctgtaactcgtgaatgatcttggaaagcggtatggtgtaaacttccggcatcgtgatcttcctccctaaagttaagacggctgcaaaagcctttttatgctgtttcagggcttttgctcccttgttttcggcgtcccacacaaagcacgcctaaggttcctgttatcttatactattatagcggatttgccgccaaaaatcaacttaaactccgcttacccatgcagcgcataaaatcttcttgaaaagtccgtttttgtgcgctatactggtgaaaacaaagcgctttcgcgcacgaatgtaaataaaaatttcggcttcaagcccgtcttaagagatttgagctttgaagtgatgaccggcgagcgcgccgcgctcatcgggcgcaacggcacgggtaaatcgacgattttaaagctacttgcgggcgaagaaagccgtgctcgaaaaccggaagatcaacgttttcgacggcaactatgcggactatctgcgcgtgacgggtcacgcataagcgagccgaaatgcaatgaaataacaaaagccttacgccttgctctttttttgagcttggtgtaaggctttttgccgtttatgctttctttttcagcggattccacacgccaaaaaggtaaaacgcgagcgacaatgtactggaaatcacccagccgaacggccatgaaagccagatgcccgtgatgccgaacgggtgcaccagaataaacgccagaacaacgcgcagaatgaggtctaagaacgtggtaatcataaaatataccattgcgcccgcaccgcgcagcacgccgtccgcggcaagctttaatgcgaggaacaggtagcacagcgaggcaataagcagaaattttttgccgatctcgatggcctccgccgaggtgctgttcataaagagcagcaggaggttttcgccgcagaacacatacgctcccataaagacgagcgccacggcaaacgacatcacaagccctgctttgaagccgctgcgcacgcgttccattttgcccgcgccgatgttctgccccgtaaagctcgaacccgagttgctgagcgccgtcaacgacgtgatggcgaacgtgttgagctttacgcctgcggaatagcccgcgacggcggaggagccgaaaccgttgacaagtccctgaatgcacaaattgccgaccgaaacgaagctttgctgcaaaatgctcggaatggctacgatcgaaatacggcgcagcatcgcaccggaaaacagcgcaggcttttcttttgtctcaatggactttaagcggcgcaagaccgcccagaacgcacacgcggaagccacgccctgcgcgaggaacgtcgcccacgctacaccgccgacgccccagtggaatacaatgacgaacacggcgtcgagcacgatgttgccgacggacgacgcgatcaaaaaccacagcggcgttttgctgtcgccgagcgacgtgaacacgccggaagaaatgttgtagataaaaaggaataaaagcccccaaatgtaaatagcaaggtacagcgccgtatcttccatgatgttctccggcgtgccgagcatgcgtaagattggctcgcacagcaccgtgccgacgaccgtgagcaccacgccaagcaccgcaacagaaataaagcccgtatacgccgccgtttttcatttctttaaaatccttcgcgccgaaaagctgcgagatgacgaccgaaataccgatgttcatgccgaacgcgaccgccatgaagatcatcgtcacggggtacgaagcgcccaccgccgccaacgcgtcttcacccgcaaatttgcccgcgatgacgctgtctgcgatattgtaaagctgctggaacgccacgctcaaaagcatcggcagcgtgaaccgcagcaaaacactcgccggcttgccggtcgttaagtccttattcatgtccgtttccccttctcttttcaaaatacgcacattattataaggaattacaaccaaaacgacaatgttcaaaatacccaagcattttcacccgcgcgcggaaaagactgcgcgttcggcaaaatcccgcccaaagtcataaacaaaacccgccgaaaaacgcatttaaaacgtctttcaggcgggtttgttcacttctatgcacgtcagcgcgccgttttccgctttgtacaggcgcgtgcagtatttcagcgcgcccgggcggtgcgtcgtcaaaatgcacgcggtgtccggcagcgcggttaaaagatttttcagaacctgcgcttcggtcttttcatcaagcgccgaggtcgcttcgtcaaggagcaggatcggcgcgccgcgcagcaccgcgcgggcgatggcgatgcgctgcgcctgtccctcggaaagcccgccgccgtgctccgcgatcttcgtgttcacgccgtttggcagcgatgacacaaacgcccatgcgcaggcggttttgagcgccgctgtcatttcctcctccgtggcgttctcttttgccatgcgcaggttctccgcaatcgtgccggaaaacagcgtgctgccctgcggtacatacgaaaacgcacagcgcgtctcggcgctgatgacgatttcgaatccattcttcccgcgcagcacagcacgtccgctttccgggtaaacgagtccgagcaaaacacgcaccagcgtcgttttccccgcgccggatgtgccaacaagcacggcaatctcccccggccctgtcgcaaacgatacgtttttcagcaccgcttcgccgtttcggtatgcggctgtcacatttttgagttctaccgtcagtgcgccctgcggcagtgccgttttaccgtggcgctccttcggcagctcgcaaagctcacgcacacggtgtgcagagatcgccgtgctcaaaaacttcgggataagccctgcggcactttcaaacgcacttgtcaggctgctgcgctgctgcaaaaaaagtgtcagcgtaccgaatgtaatggcacgcgtccacaataagtacagcccgtagcccatggcggtaaactgcgtgaacgcccccgcaacccgtaaaagcgcattcacgcgcacggaaaacatgttgtattgcaaactgcatgtgcgcagcgcttcctgtttttcctttagcttccggctttggctttgcattgtgccgagcgatttcaccgtatcgaccgtgtaaaacgtctccgcttcaaacgcggtcatttcgctgccgaggcggcgcagcttattttcaaatgcccgccgctttttgagcacggaggcagacagcagcaacaccaccggcgcgccgccgagcgcgatgagcgccatcacggggctgtaaatccagatgaggaaaaacaccgcgcacagcctgtaagccgtcactaaaatttgcggcagccagctcactgccccgccgcccacagcgcccgtatccgtttcaaagcggtttaaaatgtcgccgcaggaaaacgcgtgcagcgcctgccagtccgcgtctaaaatgcggtcgaacacatcggcgcgcacgttgttattgaggtcaatctccagctttttcagcacgcggctcaccacgcagtcgaacgcgatggagaccgccgtgctgccaatagccgcgaaaaccaaaagcggcagacgggcggtatcgtaccccgtgacgatgtcgatgaggtacttgcccgccacgctgccgaacaggccgaccgtggtaccgagcacgccgagcgctatatacagcgcgatcattttcttgcagcggcggctgtacgtgagcagccatttccagtccgccaaaacctcactgagcgcgcaaaagcgcactttgttttccttacgctccatttggcaccttttcttttcgggcatggcggcgcgcaagcatcgcgataaaaagcggccttaccggtgtcaaaacgagccacacggttttgaaaaaccgccacagcgcactgtttcggccgtaccacttacccttgcggcgcacggcaatgacaaggcagcaaatttgctcgccgtgcacggggccctcggggtcggtctggctgtcgccaaggagataccacccgcttttcgtcacgcgccaaacgcggtgcagaacgtactgcccgtctaaccgccgaaacagcacgatctccccgcgctttggcgggtgcgtgcattttacaagccgcacggcgtcccgcccgtggatgagaaaaggcgccatactgctgccgaacaccggcatttccatcacgccgcccgcttccgtttcggaaaggatcgcgccgatgtacgcgcgcagccccgcagcatctataagcatgcgcgcaggcggacggtctccgccacggttgcggggtacagcgcctcatacaggcagtcgaccgcttcttccgatatggtacaatccagcaaaaacgccggtacgcggcgcagcagtgcttccacggcatcgagcacacgcgcagattccgcctgatcccagcggttcaccgtcacctgtccgtaaagccgcaaaaatgcctccccgcgcgagagcctgcgcacggcgttctttttcgcctgccgcagcaaaatgacggcgctcaaccgcgcatccgcattttggcagatgcccgacgtgccgcagaccggccaaccgcgcgccatccagcaatcctgcaccttctgcaataaagcgcggtcgccgttgatgatctccgccccggcatattgcgcccagagtgacgcctgcgtgctcttccccgtgccggacggtgccgaaaacagaatagcccgtccgcggtggcgtatgtaggcgctgtgcagaataaagctgtccttttgcagcatgcggcgctcaagcgcgaaaagcgacgcgaataccgggtcaaacacaaggcagccgcggcagtcttcggcgatcatcacctcggcgtgcgtgtcgtccagctcgcgatacaaggcgtaaaagccaagcatgccctgtatacccaaaagccgcgattccttttcgccgtcgcgatacacgatgaggtcttcccgtacggccgtgcacacgccgacggggttcgggatactctttacaaagcgcagcgtgtagaaatacgcaggctgcacgtcttttgtttcaaaacgcagaaaattcggtggaaaaacgagtgtatcggggtgatctgccgcaaagcagaaaccgcccaacttaaagagcctgtgcatggggtacagtctctcctttcttcaaaatttcgggcgctgtgctttccgcgcacagcaggcggtagagcgcttttgtgtaggcgcacacataagacggcaccgtgccgaacgcaccgccctcgcgcaaagacgatgccggacacgcgcggcacagcggacgcagcttgcacacggcgcacgcttcattctgtttaagcgccgcagatttctcccgcaccgcacgccaagcggcctgcacgtcgttgtgttcgatcggcacggaaagcgccccgagcatcacgcacgggcgcaaatcgccgcgccagccgacggcaaacgaacaccgccctgcaaggcagtgcataccggcttccgtttccggaacagcgctttccagcgcctgtaccgtgcgttgcgcatattcgtgaaaaccgacagcgccaagttttattctcgttgctgcaaggcttgcggccgcggcttcctccggcgagagccgcgcttcatgctgtccgctttctgtggacagcatataggtgtccggctccaacttcaaatttcgttcctttgtgatttgaaataacgtttcaaggtcatgccggttttgccttaccacgctgacaccgaccttcaccggcacgccgtgcgcctgcaaaagctgaatgccgcgcatcgcttttgcgtaccctgtctcgtcaccgcacagtgatttgtaggtctctccgcttgcgccgtacagcgtaacgttcacgcggcgcggcggatttttcgcaaaaaatgccgcccagtcttcattcaaaagcgtgccgttcgtgttcaccgtaacgatcataccgcgctttcgcaccgcgagatacaccgcgcgaaacgcggggtacaaaagcggctcgccgcccgtgagcagcaaaaacagcgtgcctgcgacgcgtagcttttccgcaagcgctgtccactcctccgccgtttgcaggcggctgattttctcctgctctgtcctgttcatgcgaacataacacattttgcagtttaagttacaaagtggggtcagctcaaaactgccggtgatgggcacgcccgttttggcggcgcggcgcagtaaaaacgcttccgctgtgtctttctccgggtgcatcacgagtggttcggccgctcgttctgcgttagcgttgtggtgacatggtaatcgtcaaagttccatacaggtgtcgcatttccgaaccagtccacgacgaacgcgttcttcgccggcatcacggaatcctgcccggtgatggaatactgctgtccgcacgcctcgttatagtactttctgctgtcaatgccgcggtcatacacaccgttgccgttcgagtccaaaaacacctctcccgaaatatcgcacacgcccgtgtagcacgcggcgatgtactcgtttgcctcaaacacctccgtttgcagcagcggagcgctccatgcttttttcattttataccgcctttccttccgttttttccgcagcggaagcctcgcgcagcagccctgcgcgcagccctgcccgtacaaagttttctatgccgcgcagcatttctgccggctgcccggtgtactgcgcctctgccgcagccgcggcttctgccaccgtgcacgggtgctgaaactgcatccacaaaaaccgtcccgtttcgttcagcgcggtgatgcggttctgtggcgcgtccgtctccccggcagggatcagcacatacagcccggcgatttcccgcagcaggtgcctgccgtttacataaaatcttttcatgtcattcggcggcagccctgccgtttccatttccgggcttttcgctttttccgcccgctccatgcttatccctgcctttctgcttcgtggcttcggttataatcataacagaatttttggtattgtcaaccaaatatattttgtaaaatttaatcataattagcaaaaatcaatatatttatgcgtctttttgtcaaaaaaagaagagccatgcaggaaaacggggtgcgattttcccgttttccgcacagctctgagctttatctgtattctgttttcacattgtgatcatgacctgtacgttcgggttcttctctccgacaatcacgatcatctcaatcattttatttacataatctaaaagtgcaccggaaattttgccgtagtccgtaaactcaatttccgcttccgttttcggcatttccagtgccgcctgcaaagcttccaatgtcgatgcaacgcggcgcagccgcagctccgcattgatatactcgtgcaaatcgcgaatgtctttcacgtccgtcagctttatttctgctcgcatacgcttttccctttcgtgatgtaaatttcgcgcataaagacctcgtcgcgcgcagcggtaatctgtacgcgcacgccggaaagctttttgttcgtgtggcccgtcagcgggttctgcacggcgaacggatcttccagctcgcagatgtgcttattgccgatgcacgtgccctcgaataacgcgtaatccgccttgttttcttcgtcgatgccgagaatgcggaagccctccacgcgctgaccgtgcgtgagatcctcgcgcagcacaacgcagccgatctccaccggcccctcggtcttcagctcatacacgggctgcgtgggcgtgccgccgatgcgctccaccgtgcacggaatgcggttttcggtcgtctcgcgaatgaggtcgccgagctccttcaagcgcttcacgtcgcgttcatcgaatttgccctcgcgcgtcggcggtacgttaaggttcaggcatgcgtttgcgccacaggaacgcaggtaggtgttgtacagtctctcaagcgaatgcggttcctcgttttcgtgccagaaccagcccggacgaatggacatgtcgatctccgccggtgcgaaaacaagccccttcgagtagaggatgttcggcatggtgccaatctcgcggttcgtgttgtacatgtagctcaaagagccgtcctgcgccatcgggcccgcgccggtctgcacctcgccgtaaaagcacagctcgctcggcacaacggcccattcggcatggcgcgcctctccggcctcgtttccgcaccaccgggtatccgggccgaaatcattgaaaatgacggcgttcggctgatacttgcggatgagctcaaagtaacgcgggaagtcatattcctgctttttgccgttttcgccctcgccgcaggcgttatcgaaccacacgcagaaaatatcgccgtagccggtcaaaagttccgtcagctggttgcagaagtaatcgttatattccggcgtgccgtaatattttgagttgcggtcccacggagaaagataaaaaccgaacttgatgccgccgcgcttgcaggcttctgcggcttcacgcacgacgtcccccttataagggctgtttttcacgctgtgctccgtgtatttgctcggccacaggcagaaaccgtcgtggtgcttcgccgtgaggatgagacccttgaggcccgcagacttcaccgcttccacccactggtcgcaatcgagcgcggtggggttaaaaatcttctcgtcctctgtgccctcgccccattcgcggtccgtgtaggtgtttacaccgtaatgcacaaacgcatagcgttccatctcaaaccaatcaagctgtcgtttagacggcaccacatgcgccgcctctttcaaaaattcaaccatactgtcctcccgaatttcggttttgctgctctgctcgtattatagcacaaccgcgcaaaatgtcaaaaataaaaatgcggcgcagaaagctcgcttccgtaccgcatttaatcgttattttagaacgtgacgcgcaccgtggtgcccttgttcggctcgctttcaagcgacacgcgcgcatggtggaacatggcgccgtgctttacaatggaaagcccaagtcccgtgccgccaatctgcttcgagcggctcttatccacacggtagaagcgctcgaacacgcgctcgcggtcggccgccggaatgccaatgcccgtatcgctgacctgcatatatgcgtggccgccttctgtgccggtggagatcaccacgcggccgccgggacggttgtactttacggcgttatccgcaaggttatacagcatctcgtctaaaatgtacggcacgccggtgacgaacgccaagctgccctgcaccgagatgacaatactgttctgctgcgccgggattttcagacggcaggccacctcctgtgcaatggcataaaggtctgtatcggcgcggccaagctctaccgcattttcgtcaagctttgaaagcttcaaaatatcctcaacaagcgtgataagccgctgtgcttcggtataaatgttgttcgcaaagcgcggcacatcggcactcttgacgagcccgtccttcataatctccgcatagcccgaaatagaagtcagcggcgttttgagctcatgcgaaacgttcgcggtgaactcgcggcgcaggcgctcgttctcttccttttcggtaacgtccagcagcacgatcaccgcgccctgcacgccgttatcgttcgtaacggggttcgcgatgaggctgtaactgcgccccgccagctttgtgatgcgctcgctcgccgtacccgtcagcgcggaatccactgcatcacggaaatcggggctgcggttaaacgccagcacgctctgtgggcggtcgtcctccgggtgtacgtccaaaaggcgcacagcgctcgtgttgtacgaaagcacatcaccctttgcatccaccacaataaagccctcgcgcatgttttcggtgatggcggtaaactccgtctgcttgcggtgcagctcttccattttctccttgatggtctcgttctggcgctgcaagcgcaaaagcagcggcgaaagctcgccgtacacgtcgttttccatcggatggtcaaggtcaatggcgttgaccggcgccacaatctgctttgtgcggtacgtggaaagcaaaatggccagcaccaaaataatgacggagcacagcagcatccacggcaccatgcgctcaatggagccgaacaccgtcttcataccgaccgaaaggcgcagcacgcgtccgtccgagagcatcacagcgtagttatacgactgcacattcagcgtatcggattcacgcacggattcccccgcaccgttttctcttgcagcaatgacctccgggcggtcgttgtggttttccatgtttgcggcatctgcaacactgtcaaatcgcaccgtgccgtccgtatcgatgacggtcacgcgcacagactgcgcggcggctgtatcatacccggcggagcggatgtcggaaaggtaatcgtccccgccaagggcgatgccgttttgaatgtagtggctttccgctatggtcgcctttttcacgatttccagcgaatcgtagtacgaaacgacgccggaaagcaccatagaaagtaaaatggaaagcagcgcaatgcacgacatgctgaaaatgatctttttcttcatgcgtctttctcctctttaatcctgtgccagccggtagcccacgccgcgcacggtctcaatgagcgcaccggcatcgccgagcttttgccgcagcgtgcggatatgcacgtctaccgtgcgggtctcgccgctgtaattgtaatcccagatcttcgtgagaatctgatcgcgcgaaagcaccacaccgcggttttccagcagatagcacagcagttcaaattctttgtacgtgaggatcacgggttcaccatcaaccgtaacagcgcggcgcttcacatccaccgcaagcgagcccgccgtaaaaagcttatcctccgccgcgggctttgcggccctgcgcagcagcgcacgcacacgggagacaagctccatcatgccgaacggcttcggcatgtaatcgtccgcgccgctgtccagcccaaccacacggtcatattcgctgcttttcgccgtcagcatcatcacgggcaggtcggccgtttccgcacccgcgcgcagacgcttcaaaatatgcagaccgtcttcatccggcagcataatgtcgagcagcacgagctgcggcagctctttttcaagcgcctgccagaaatcggccgcattccggaagccctcggcttcaaaaccggtggtgtgcagtgtatagagtacaagctcgcggatgctgtcgtcgtcctccacaagatagatcataaacccttaaatcctttctgtgcggctttgccgcttaatcgtgctcgccggtgagtgagaacacgacccactccgcaatattgaccgcgtggtcgccgatgcgttcaaaatacttcgccaccatcagcaggtcaaggcatgtctcgccctcctcgggcttttcggcgatgagtgcgatgatctcacttttcaccttgttaaagagcgcatctacttcgtcgtccgctttttccacggcgcgcgcaatatccatgtcacggcgcacaaacgaatcgacgctgttcgtcaccattttcacggcagcgcgcgccatttcggcaatgtgcaggctgcccggcagcacctctacgcggatatgctcgaccatttcggcaatatccgaagcctggtcgccgatgcgctccatatctgcgatcatcttcatcgcggcagagatgagacgcaggtcttttgcaacaggctgctgctgtaaaagcaagcgcaggcagatcgcttcgatttcgcgctccttgcggtcgatttcctgttccgtttcgtccacggcgcggcgcagcgcttcgtctcgtgtcacaagcacctttgccgcctgcgaaatgccgtcttcgcacaatgcacccatgcggataagctctgtattgagcagctccagctgctcgtccaaacgatttctcattgtagtcccgttcctttctgcaagccttaaccgaatctgccggtgatgtaatcctccgtgcgcttatccttcggcatggcgaataagctctccgtctcgccgtactcgatgacctcaccgagcaggaagaatgctgttttgtccgagatacgcgccgcctgctgcatgttgtgcgtgaccataacgatagtataatcctttttcagctccaccgcaaggtcttctatcttggaagtggagatcgggtcaagggcgctggtcggttcgtccatcagcagcacctccggctccacagccaacgcgcgtgcgatacacagtctctgctgctgtccgccggaaagccccagtgcgcttttcttcagtctgtctttaagctcgtcccaaatggcggcgtttcttaaagaacgctccacaatgtcatcgagcttcgccttagagcggatgccgtgcgtgcgcggtccgtaggcgatgttgtcgtacacgctcatcggaaacgggttcggcttttggaacaccatgccgacacgatttctcaaaaggttcacgtccatgccgtggtagatgtcctcgccgtccaattttactgcgccggtgatacggcagccctcaacgaggtcgttcatgcggttcaaggatttcagcagcgtacttttgccgcagccggaaggcccgatgaacgcggtgatctcgttcggctgaatttccatatggatggatttcagcgcgtggaaatcgccgtaatacaaattcagatcttcgattgccaatttacagctcatatcgtttcccctatctttttctggtgtgattttctaaaaggttcgctttagccctgtttcttcgtaattttcttcgcaacgaacgaggacagtgcgttgatgccgatgacgataacaagcagcacaaccgctgtggcatacgttttgtcgatgtgcaggccctcgctcgaaagcacatacatgtgcacggagagggttcgcacggaatcgaacagaccgccgcccgcctggcccggcatctgcgccacggagcccgcagtgtacatcagcgccgcagattcacccacaacgcggccaatggccaaaatcacgccggacaaaatgcccggcacggcgctcggcagcacgatgcggaacacggtgcgcagtctgcccgcgccaagcccgaagctgccctcgcggaaggaatccggcaccgagatgagcgcctcctccgttgtgcgcatgataagcggcaaaatcatgatggcgaccgtaaacgcaccggcaagcaaagaatagccccagtgcagcgccgtcacaaagcacagatagccgaacaggccgtacacgatggacggaatacccgaaagtgtttcggtcgtgatgcgcacgagctgcacaagcttgttgccgcgctttgcgtattccacagagtagattgccgcgccgatgccgagcggcagtgcaataacgagtgcaatgatcgtcatgacgaccgtagaaatcagcgccggcatcagcgacacgttatccgacgtataggtgaacgagaaaagatccggtgtgatatacgggatgcccttcacaagaatgtaaaagataaggtataaaagcgtcagcatcgtgatgagcgacgcgccgcagacaagcagcagtaagataagcgaaagcggcgagcgcttatacgcgcgcattttatccttgaaggtgagcttgttgatggtctctgccgccacgggtttacaggtacgttccatagtcatttccgtatcctttccgggtcatgccctgtcttttctgcgcagaagcgagaacgtaacgttgataattaagataaacacgaacagcacgaccgccgtcgcaatgagcgcctcgcggtgcaggtctgtggcatagcccatttccataacgatgttcgccgtcatggtgcgcacgccatcgagcaacccttgcggcatacgcgccttattgcccgccaccatgacgaccgccatcgtttcgccgatggcacggccgataccgagcaccacacccgccaaaatgccggaacgcgccgccggcaatgtcgcaaagaacacgctgcgctcatggctcgcgccgagcgccagagagccttcatagtagctgtccggcacggcgcgaatggcactttccgaaacgccgatgattgtcggcaagatcataatgccgagcaaaacggacgctgtcagcatcgtgttgcccgccacgccgaaaatgttctgcacaagcggcaccaaaacaacgagaccgaagaagccgtacacaacggacggcacaccggccatcagctccgttgcaggctttaaaatcttataaagacccttcgggcagaacttcgcgaggaaaatcgccgtcagaagcccgatcggcacaccgatgatgattgcgcccgccgtgacgtagaggctgccgaggatcatcggcagaatgccgtagatgtcgttgcccggcttccacttagtgccgagcagaaatttgaacacaccgatcttaccaatggccggaataccgtttgcaaacagaaacacgcagatcaaaacaacggcaaagatcgatacgcaggctgtgagaaaaaagaggatatgcatgagaagctcttttatgttgctccacttcacggtttgcacgcacctttcaaactttcaaaactactaaaaactgctttattggcttccttgcgaaaagagccggacctttccgcccggctctcctgcgttttatggattgtttcttactgaagctcggaccaatcggtcgtttcgccggtgtagatgctcaaaacctgctcgctcgtaaggccggtcagcgcattttccttgttgacgataacagcgatgccgtcctgtgcgatgacagtcggggtaagaccggcttcaagctcgctgtccttcagctcacgggaagccatgccgatgtcatatgcaccgtcgatggtggaggtcatacccgtggtggagtcgctctgctgcacttcaacggtaacgtccgggttcagcgccatataagcttccttcagcttttccatgaccggcgtaacggaggaggaaccgccgacaacgaccttgccggaaacgccggacgccgcgtaagccggagccgcatcatcaacggtgatataaccgttttcggagacgaccttctgaccgtcagcgctcatgatgaagttgatgaagtcctgtgcaacttcgcttgcctcgccctttgttgcaatattgaacggacgaacaaccttataggtgccggcctttacattctcaacggtcggtgccgcaccgtcgatctccacggctttgacaacgctttcgtcaagggagccgagggagatatagccgatggccttcgggttgccctgtacggtggtcatcataacggaggtgctgttcgtaatctgcgcatcatccgtcgtcatatcttccttttcgccagcgtcgttcttctgctcgatgccgaacagctcgatgaacgcgccgcgtgtgccggagccgtcttcacgggaaagaacggtgatttcgccggtcatgtcgccgccggtcgtttcttcggaggaagcgctctccgcagatgcagcggaggattcggaggacgttgtctcggaggaagcggagcttgctgcgccgccggagcaagccgtcatagctgtcatggtgagaagtgcggctgcaagaaccgcggtgatctttctgcgtttcatacgttactctttcctttcgggagctttctgctcgccttttatcttttcctttggtttacaagcgaaagtatagggccgttttgtaaactcaaaaagaagtcttgtgtaaaatccacgtaaaactgcttaacatttcgggttttacaaagccaaaatcaaaaagaacattgaaaaaaagcccgttttgcggtaaaataaacctataaaacacggaggagttttttatgcgcagcgaaaaagaaatgtatgacctcatcctcggctatgcaaacgacgatgaaaatatccgcgccgtcatcttaaacggttcccgtgcgaacccgaaccgtaagcccgacccgttcaatgattttgacattgtgtacctcgtgcgcgatcttactccgtgcaaggaaaaagcctattataaagacttcggcgaaatcctcgtctacgagcgcaccgacgaaagcgagctttttaaagagcactttcccgagttcgtatgctatctgatgcagtttgcggacggcaaccgcatcgacctgaccgtatcgagcatcgaccgctgggaagtatattgttatgacgaccgcctttccgtcgtattattagataaagacaacgccctgccgaagctgccggagccgaatgagagcacgcactacgtcaaaaagccgaccgagcgtatgttttttgactgccgcacggagttctggtgggtctcgccgtacgtctccaagggtctgtggcgcggccagctcctgtttgcgcagacgcacatggaaaattgtattcgcaaaatgctgctgcaaatgatgaaatggtacgccggaacgctgcatgggtttgattacagcgccggcaaatgcggtgacgccttaaaaaaccttctccccgcagacatctggaacggctaccttgaaaccttcgccgcatgcaccgaagaagacatttggcgcgcactgtttaaggcaggcgagcttttcacggagctcaccaaacgcaccgcaaaagcgctcggctttacggtcacggacgaatacgaccgccgcgtcacaagctttttaaaatacacaaaagatttgccgagaaacgccaaaacgctggattttcatattgactaaaagaaaggacccctatatgcaaatattatgtatcggcgacgtggtgggcagccacgggtgcgactttctgcgccgcactctccccgccttcaagcgcactaagggcatcgatgtcgtcatcgcaaacggcgaaaactcctcggacggcaacggcatcactcctgcctccgcaaaccacctgctggatagcggcgtggacgtcatcaccaccggcaaccacacctaccgccgccgcgaattttacgattatatcgatgaaagcgactgcgttatccgccccgcaaacttcccgccggaagccccgggtaaaggcatgaccgtcttagatctcggccgcacgcagatcgccgtcatcaacttaatgggcagtgtataccttgacgagcacctcgcctgcccgttccgcacactcgatactcttttaaaaacgcccgaccttccgaaaatctgcatcgtggattttcacgcggaagccaccggcgaaaagcgcgcgttcggctattatgcagacggccgcgtctccgccgtgttcggcacgcacacacacgtgcagacggccgatgaaaccgttctgccgaagggcaccggatacatcaccgacgtcggcatgaccggccccatcaactccgtactcggcgtcagagcggagctcgtcatcaaaaagcagataagcaaaatgcccgtgcggttcgattttgcggacggtccgtgcaagctcgactgcattttgttcgatatcgatgaaaaaacaggcctcacccgcagcacagagcgtttctccctgcgctaaacgtgatttctgtgcggtattacccttgttttttcccgcaaactatggtatagtgtagtttgaaaatacatgcaaatatctatcgggagccggttttttcgccttccgaacgtttttagacaggatgtgtatgcagtgattacaggtaaacagcttcgcgacgcagtcatctccggcgcgaacagcatattgaaaaaccggaaatttgtggatgacctcaacatcttccccgttccggacggcgacacgggcacgaatatgtccatgacgatcggtgcaggcagcgacgccatgcaggcgcttgcggataacgaaacaaccgctaaggtcgcaaaggcggcggcttccgccatgctgcgcggcgcaagaggcaactccggcgttatcctttcccttctgttccgcggcttctcgaaaggtctcgaggataccgtagaagcagacggtacacagctcgcagcggcgctcgctatcggcgtggattccgcttataaagccgtcatgaagccgaccgaaggcaccattttgaccgttgcccgcgtggcggcggaaaaaggcgctgcggcagccgagatcgacaacgaccccatttacgtttgggatgccatctgcatgggcgcggcggaagcactggccaccacaccggatcttctccccgttctgaaaaaagcaggcgtcgtcgatgccggcggtcagggcctctgcatgatcttcgatggcatgatgcaggtcttcaagtacggtgagatcgtcaaaaccgacatgaccgaagccgaaaaggccgaggagaccgcccagttctttgcaagcgttgcggcggaatttgacagcgagatcaacttcacctactgcacggagttcatcgtcggccgcgacccggaagtcaccaccgagccgaacgagctgcgtctgttcctcgaaaccctcggcgactgcgttgttgtggtcgatgacgaggagatcatcaaggtgcacgtacacacggagcagccgggtgtggcgctcacaaaagcgctggaattcggttccctgctgaccgtaaaaatcgaaaacatgaaagagcagcacaaaaaagctgccgaactcaataacgcaaaccgcgcggcttacgaagcggcgcagaccagcaaagaggaaaaggagaccttaaagcccgtttcccccgaagaggaactcggctttgtttccgtagcggcaggcgacggtctgcgtgcactctttgaagagctcggctgtgcacaggttgtcagcggcggccagacgatgaaccccagcacggaggacattgtcgaagccgttcttgccaccccggcaaagacggttttcgtactgccgaacaacaaaaacatcatccttgcggcagaacaggccgtgccgctcgtcaccgaccgcaagattatcgtcgtaccgacccgcaccattccgcagggtctctccgcactcttaagctttgacccggatgcttccgcagacgaaaacgcttctgccatgctttccgcagcggaaaacgtcgcgaccggcacggtcacgttcgccgcacgcgattccgaattcggcggcttcaaaatcaaagagggcgacaccatgggcatgacgaacggcaagctcgagtttgtcggcgacacgccggtgcgttccgtctacaaggtcgcaaaggcgctgatgaataagcacacctcgtttatcacgctcatttacggcgaaggcatcaccgaggaagaagccaacgaagcactgcgtctcatcaagaacaaggcaggcgacggtgtggacatcaacctcgtaaacggcggccagccggtctactacttcattctttccgtggaataatttcaaagcagcttagggcggggctttatgccctgccctttttcgttttatgtcggaggtttcatggcgtctttatttgaagcggacattgcgtctttaaagggagtcggcccaaagcgggcggagctgttccgcaagcttggcgcgcccacggtgggcgatctgctgcgtctctatccccgcgcttatgaggattggcgcgacgcggtgcccatccgcaatacactcttaaacgaagtgaatatcgtaaaaggcacagtgctgcgccgccctgtcgagcagcgtatccgcggcggcatgacgctttacaagacgaccgtcacggacggcgaaggcgacatgcagctgacatttttcaataaccgctacattacaagtctgctcacggagggcgcggtctacgcgtttcgcggcaaggtaaccggcacgttcatgcgccgcgaaatggcctccccggagttcgttcccgaaagccgcatgcaggacatggtgcctgtttacccgcagacgagcggcctcacctctcgcatcatcgcaaacgcggtaaaagaagccctgcgcctgctccctgagaccgtcaaagacccgttacccgacgcgcttcgcctgaaatacgcgctgtgccgccttgaatacgcgctcaaaacgatccactttccgaattcgcccgaagcgctttccacggcgcgcagacgactcgtgttcgaggaactgctcgtcttgcagctcggcatggcggaaatccgccgcgcaggtgtgcgcgaaaatccgtatccgctcaaaaaggattatacaaaagagtttgccgccctgctccccttcacgatgaccggcgcacagcagcgtgccgtgcaggacggcatccgcgacatgcagggcccgcacccgatgaaccgtctcattcagggcgatgtcggcagcggtaaaacagccgtggcggcggcgctgtgccacacggtcattcaaaacggatttcaggcggcgctcatggcccccacggaaattctggcggcacagcactacgagtccctctccaatctcctcgccccctgcggcatcaaaacggtgctcatcacgggcagcatgcgcgccaaagcaaaacgcgaagccattaagggactcaagaccggcgagattcagcttgccgtcggcacgcacgcactcatcagtgacggcgtggagttctcgtccctcgcgctcgtcatcacggacgagcagcaccgcttcggtgtcaatcagcgcaccgcgctcgcgaaaaagggcaacttcccgcacacgcttgttatgagcgccacgccgattccccgcaccttggcgctgatgatttacggcgacctcgacgtttccgttctaaatgagcttcccccgggacgtcagcccattgaaacgtatctcatcgacccgccaaagcgccgccgcgcgttcgggtacatcaaaaagcacatcgacgagggacgacaggcgtacatcgtctgcccgcttatcgaagagggcgaaagcgacgcggcaagcatcgcggcgtatgaaaagatcgtgcgcgattacttcggtgacatgcccatcggcattctgcacggcaagatgaagccgaaagaaaaggacgccgtcatgaccgattttgcagaaaaccgcacgaaattattattgtccaccacggtcgtcgaggtcggcgtggacgtgccgaatgccgtcatcatgatgattgaaaacgccgagcgctacggcctttcgcagctgcaccagctgcgcgggcgcgtcggccgcggcaaatacgcctccacctgcattctggtgacggaagcacaaaacgatgaaacattacagcgcttaagactcttttgcagcaccacggacggcttcaaggtcgcggacgaagacctgcgcctgcgcggtccgggcgatttcttcggcgagcgccagcacggcctgccgaaattaaagattgccgacatgttaaacgacatgcagattttgcaggaagcgcagcagtgcgccaaagagctgaccgagcgcgacccggagctcagctctcccgccctgcgcggcctgcgcgccgaaatgcgccggctctttgcatcaaataacggcacagtaaccctataataaaaacaaaacagcttccgttcggagaaatcccaaaacggaagctgtttttttattccatgataagctctttgtcttccggcagcttaaacggcaccggcttcggctctgtctggtaccaatatgccacagacgtgtaatcgtcgtagcgcgggcccgtccagccgaggttgtcgatcgtcattttaaagtcctcatcgaaataaaccgggtctttcacgtgccagcggtacagcataaagcgtttttggtggttatacatttccttcgtgtcgcccaaaatcgcatacaagcccgtataaagcccgctgaacgtctggtagcggttgaggtaaatgtcattgccaaagccatacgagccgcagaagtaatcctccgtgcccgtgtagttcatcgtgggatatgtgtcgccgtcgatatacattttggcttcgccttccacccagcaggtgttgtgcccgttcatgccggaagccagcgtcacgcccgcaaagcagcccttgccgtgcacgccgtccaagatcacatacgagcgtcccttctgcacagggtgctcctgccgatatgtcgcgtgaaaatagccgctgttttcgggaatctctccataccatccggaaatcatatagaaaagcgtctctgccttttcaccgcgattttccattgtaatacggcagtgttttctgaacggcatttcaaagtagctgttgaacccgcgccccggtgcgacgagcatcatagccgagttcaaaaccgggtaattgccgtcgcggtcagaaaaattctcgtcatacgcgcaaccgaaaaatgccgaaaacggcgcttccacggacggctgttcattgttttcccagtagattcgcagaataaacgagtgtcccacgtaacccgtgaaccacatgtgtgtcaccatgcccgggccgtccgtgtcacacagcgtaacggtctcgccgggctgaatttgaatgcatggattcagcttttcacagtccttgccgcgtgtgccgccgccttttgtgcctgtcggattttctgcggaaaacccaaagtttctgcggttttccattttaaaaagtgtcatgaaaatgcctcctttatttctgttagagtttaatactaagcatttcttcaattgaaccgagtgccgcgcgcccctcataaagtccctcgtcatgtaaagcgagcagcgcgggaacctccgcctttgtgcggctgacgttgagcggcttcaacggacgaatgatgaccgccctgcccgctttttcaagcttttcacacaacgccaactggcggttataaatctcatgacgcgtgcgcatcgcttctgccacagcagggtacttgcgaaacgccgctttcaaaaacgccgtgtgcccaaacggttccttttggtagcccttgttgcgcgtcaaaacgatcacatggaacgtgttgccgtctgcaagcgacttttcgattggaatcgggtcactgatgccgccgtccaagaggtcatagcccatataatgctgaattttcgtgatgagcggcacggagcacgatgcacgcgaagccataaacggcgcttttagcgtgtccttttcaaaccaaacggtcttgccgtccgcacagttcatcgcgccggtcaaaaagcgcgtatcctgctcatgaaacttgtcccagtcgaaaaaaatgtgcttttccggcaccgtgccgaaaatataatcaaagtcgaacatcgtgtgctttgtcaaaagatttcgcgtgctcacatagtcggggttcccgacatagtgttcaatgatctctcggctgcgccccggttggcccgatatgtacgaaagcgcgttcgctgcgcccgccgaaacgccgataatatacggaaacagcagatctttttccatgaacgcttccatcacgccgcaactgtaatagccgcgcaggccgccgccctctaaaacgagcgctgtgccctcaggcagccggcgcgaaagcgtcttgccgggaatcggctgcaatgtataatcggtcacaaatctcaccctctttgcgctcatcatacaatattaagttaaaaaagtcaaggaggaaagccgcagcttcctccttgcaacaaaacggttcagtttagagtttcaagcatctcttcaagctcctccgggctccaatcttcgccgagcacaaacacggctttgtgaaacacaaaaagctcgtcttcgtccaactcaccgctttcgagcttgcaaagcatccccggcgcgatttcgatcaaccgttcggtgatggcaaatttctgcttccgcacagcctcccgtgcgttgcgcacagtgccgaaatctaaatcgctcgtgctgccgcacggcatggcgcaatacgcacagtccggcgcaatgcggtttttctccgcgtgggcgcacgccagcatgttctgcagcgccgtttcatcatcctccgcaagcgcggcaaagccctcaaaaagcactctgtctgtttccacggtcttcgcgtttttctgctccgcgcggacaacgcccacaagtgcccccagcagcgcatcccacgtttggtttcccgtcctcattctacgagactgccgtcggtcgcgatgaccttcacctgccacgggatgaacttgccgctcgccttcagtgcgttcactgccgcgcgctcaaggccgccgcagcacggcacctgcatgcgcacgattgtcaagctcttgatgtcgttctgacggatgatctccgtcagcttttcggtgtaatcgccctcatcgagcttcgggcagccgatgagcacttttcggttgtgcacaaagtcgcggtgaaaatcaccgtacgcatacgccgtgcaatccgccgcaatcagcaggttcgcgccgtcaaaatacggggcgcggatcggcgctaatttgatctgcaccggccactggcgcagctcggattcaatcttgccgctgaccgcacggttatccgtatttacagactttctctcaatagcgcgtgccatgctgcccgggcagccggtgaacttcggcgtgccgagcttttctgccatttcctctgcctctttcttcgcggctttctctgccatagccattttcacggcttcctcgtcaaacgccgccgcttcgcgctccacaaaggagattgcgttcgtgggacatgcaggcaggcagttgccgaggccgtcgcagtaatcgtcgcgcagcagcttcgccttaccgtttacaatgccgatggcgccctcctgacaggcattcgcgcacaggccgcagccgttgcatttttcttcatcaaagtgaacgatggtgcggatcatattcaaaattccttccaatttttaaattttgcaaaagccacaaggttttctcttgactttacgaacacagtatactacgattaggctgtaaagtatgttgttataacaacgaagattgaaaaaaggaggctattttacggattacagcatcttagggcgctcgccgctgtttcggggcatccccgcaggcgatttcggcgttttgctcgagcacctaaaagcggaaacgcgcagctataaaaagggcgatctcatctgccacgcgggcgagcacacaaacgcgctcggcatcgtgctcacgggcagcgtgacgattgaaagcgacgacattttcggcaaccgcagtgttctcgataaagtcggtcccgggcaggtctttgcagagacctatgcctgtgtgccgaatgaaccgatgctcgtcaatgtcgccgccgcagaaaactgcaccgtgttgtttttgaaaaccgcgcagatcctctccccgtgcgccgtaaactgcaggcaccacggcaagctgattgaaaacctgctgctcgtcagcgcgcagaaaaacctgtcgctttcgcgccgcattttccacaccgcaccgaaaacgatacgcgggcgactcatttcatacctgtcgtttcaggccatccgcgaaaacagtgacagcttcacaatcccgttcaatcgccagcagcttgcggattacctcagcgtagaccgcagcgcactttctaaagaaatgggcaaaatgcgcgacgaaggcattttaaacttctccaaaaatcattttgaactaaagcgcacaagctgacggaaagcgagacgaataaagtctttgttcaaactttcttcgagaaagtttgcgggtttttagggcaggccctaaatcgtcgtccgcagacgacgaaatctttttgcgttcgcaaaaactaggaaggtagtttggaacgtccggaggacgtttcaaacgtaggaaacccagttgcatgggtttcctaaaggacttgccaaagcaagtccttagaaaaatcaccaccccacagtaaattatagaaaggactcatctccatgaaaaacattttcttccgcaccacgtctctttgggcgtccgtcctttacatggcgctcggccttgtgctcacgttttggccgggcatgtccggcaccgtcttttgctggggcatcgccgctgcactcattttgtacgccgcacatagcttctggtattttataaaagccagaaacctcggcttcactgcaggcggcacgctcgtcatcggcgttctctgccttgcgttcggtattttctgcttttcccgcccgtacgtcgtcctctctttcctgcccatcgcgctcggcatcatgctgcttgtagacggcatcggaaaaatgccgctcgccgttgatgccctctcggtgtacagcccctaccgcttctgggtactcatctccgccgtactgccgcttattctcggcatcgtgctgctcgtaaatccgttccgtgccgcaaaagccgccatcatgttcttcggcatcagcattttagcagacggtctctttgagctcatcacctacatccagcagcgccgcgcagaaaaatccgagtacaaggacatccgctaaacaatatttttgcaataacaggcaacacataccgttcgaccgaatgtggtatagtatgcttgtaatattctgtatggaggtacaaacatgaacccgaacattgaaaaggcgtttcacgattacgaagcgctcatcgcaaaagagaacaagcctgccgctttttacaacggcatttacacgcgttacaagaatcctgtcctcacccgcgaccacattccgccgttctggaaatttgacctgaacgaggagacaaatccgctgggtcttgagcgtctcggcgtgaacgccgtcatgaactccggcgccatcaagctgaacggccagtactgcctcgtcgcccgcgtagaaggcaatgacagaaagtccttcttcgccgtcgcgcgcagcaataaccctgtgcagggcttccgctttgatgattacccggtcatcctgccagacacctcccccgaggaaacgaacgtctacgatatgcgtttgacgcaacacgaagacggctatatctacggcgtgttctgcagcgaaagcaaggataagaccgtgaacgacctctccgccgcattcgccgctgccggcattgtccgcacaaaggatctcgtcaactgggagcgcctgccggacctcaagacgaaatctccccagcagcgcaactgcgtgctgcacccggaattcgtcaacggcaagtatgcgttctacacccgcccacaggacagcttcattgaagccggcgaccagggcggcgtcagcttcggtctatgcgacgacatcacaaacgctgtcatcgacgaagaaaaagtcgtcagtccgcgccgctaccacaccatcaccgagtccaaaaacggcgccggcgctgtgccgatcaagaccgaaaagggctggatccaccttgcacacggcgtgcgcaacaccgcagccggcctgcgctacgtgctgtatgtcttcgtgaccgacctgcaggaccctgcaaagctcatcgcagaaccgggcggcttcttcatcgccccgctgggcaaagagcgcgtcggcgatgtttccaatgtcgtgttcacgaacggtgccatcgctgatgacgacggcaaggtctacgtctactacgcttcctccgatacacgcatgcacgtcgcggagacgagcattgcacagctgctcgactatgcgttcggcaccccggccgacccgctgcgttccgcagactgcgtccgccagcgctgtgctctcatcgagaaaaatctcgaatatatgaaagcgcacaaataatttctcttaaagcataaataaacgaagcaccgtgtccttgtgaggcacggtgcttttgttttgactatattcgtttacttcgtaattttcagctcgccgttccagaccttgctgccgctttcctcaacgtaaagctccactttactctcttccggcgcaaactgcattttgcggttccagatgctcagtgcgtcacagtcaagcttcagttctaccgtcttcttttcgccgggctggagatacaccttctcaaacgctttcagctcgcgcacgcggcggacgattgtgccgctcacgccctgaatgtacagctgcaccgtcgcatggcctgctgtgctgccggtgttttccacctcgcatgtcacggtatgcgcttttccgttttcaagtgccgcaatagaaatttccggcgtgccgtcctttacggtcgtcttgaacgtcgtgtagtgcaaaccgaagccgaacgggtacagcggcgtgttctccaaatcgcggtagcgcatcacatcgtaggaagcgcgggcgttgtagtacaccggcagttgtcccgttgtgcgcggcacagaaaccggcaggcagccgcacggatctgccgcgccgctcaaaacttccgcaatggccgtgccgccccacgggcccggatagaacgaccacagcaccgcatcgctcttttccgcgatctcggggatagcatgcgggcggccggaaatgagcaccgtcacgaccggcttgccgctttcaaacacggcatttgccagctcgttctgcacgcccggcagacgcacatcagaggtatccacgccctcgccgcaatccatctgcaatttcgtaccgacgattgccgcgccgttcgtgtcaaactccgcgcccgcaaagcggcttgaagaaccgcccagcgccaaaatgacgaggtcgctctcctccgcaagcttctccgcctccgcaataccggaagtatcgtcgtcgcagatcgtgcagccgagcgcatagcgtacatcggcgttcttaaattcgttccgaatgccgtcaagcaccgtcacacccacaccgtcacgcagcggcggtgtgtagtcgccaagctgctgatacagcgcgtccgcgttcgggccaatgactgcaatacgcagcttcttcgcctttttcagcggcagaacaccgttgtttttgagcagcactgccgactgccgcgcaatttcaaggctctgcggaaacgttttcggcacattgtattccgtcagcggcttttcttcaaggtacgggtgctcaaacaacccgcgcgcaaatttcagctccagcacgcgaagaaccgccttgtcgagcgtttcttcggaaacgagcccgcgctccacggcttcttccaggtgcgggaagctgtcgtcccacaggctcacgtccacgcctgcatttaaagcatacgcgccgtttgccgccttgtcgttacccgtcagcatatcgagacgatcaatcgctacgccgtccgccatcacgatgccgtcaaaaccaagcccctcgcgcagcacgtcctttaaaagccactcattcgcatggcacggcacaccgtcaatctcattatatgctgccatcacacccgtcgcgcccgctttcacggccgccttcatcgcgggcagatgaatttcgcgcagctcgcgctcgccgatgcgcgccgcactggcgtttacgccgccggtcgtttcgccctgtgcgcagaagtgcttcgcaacaacctccaaaccggcgctcgcacagcccttcaccgccgccgcagcgttctgaccgcagaggtatggatcttcgccgtagcactcttcgcttctgccccagcgcgggtcacgcagaatgtccagcatagaaacgagcgcaaaatccacgcccatttctttctgctgctcgccaacgaccttaaagccctcttcaacgagcttcgggttccacgctgcgcccatgccgaggttcaccggcagcaaatagccgtcgagcgcctggtggccgtgcgggcactcgctgctcatcagcatcggaataccgaagcgagagtgctccagtacatagcgctgcgccagattataagcgtggattgcgttcacgccggtaaggccggtcgtataatccttgttcgcccacgggtctgcgcggtataagccgtaaagcacaccgaggccgccccattttcccacttcttctttaaagctgtccgcaagctccacgtgctcgccgtcgcaggtgtagctctgaaagccgtaaagcttctgattcacctgaccgaccttttcgcgcagcgtcaggcgcggcagcaggtcttccgcacgctctttcggagaaagcgcactgtctttaaatttttctttcattttcattgtcctctccattgaaactgtcaaccgacacaaaactcagttgtgcgtacatgttaaagcatagcacacctttgcacggttgacaaggaagaaaatcaaacgaatttttcgtacagctttcacggaatttcatcacttttctttttgcatatcctgtgttatactataaaaaagcatccatgaccgaaggagcacccctatgaatccaaaaaaattccccatgcccaccggcatgctcttaaaaaccgacgacgaagaaaaattccttccgtttcaaaacccaactacctataaagacatcaccgtcgagttaaagccgaatggcgaagctctgcgcgtatacgtcaccgccgatacaacgcccgtgcagcgcatcacgctctatttcgcggacccgctgcccgaaaaagcgcaggttttaggcggtgtttgggagcgcggctacggcgactatgaatggcgcggttatgtcccccatcgcgtcatgccgtggtacttcttcctgcagagcggcaacaagaccgaagccttcggcgtgcacacgcagcccgctgccatgtgctggtggacagccgaaagcaccgggtacagcgtatatctcgacgtgcgctgcggcggtctcggcgtgcgcttaaacggccgcaccctctgcgctgcggagctttgccgcgcagaatacgaagacgccgacggctttactgccatgggtgaatttttctccgttttgagcccgaatcccattctgccgaaatcccccgtctacggcgcgaataactggtaccatgcctacgggcatgccacggaagatgacgttctgcgcgaagcgaaggccctcgccgaactcaccgaggggcttgcaaaccgcccgtggttcatcatcgacgactgctggcaaatcgaccgtgcggataactacaacggcggcccgtggcgcgcgggcaacaagggctttccggacatgccgggcctcgccaaaaagctgcacgaatccggcatacagccgggcatttgggtacgtttattatgggatcacagcaaaagtattcccgcctcttggcgctcgaagcgtgaccccgaatacctcgacccctccgtgcccgaagtgctcgaccacatcgcggaggacatccgcaccgtctcaagctggggttacaagctcatcaagcacgatttcacttcctacgacgtactcggccgttggggctttgaaatgggcgacgagctcacggacagcggttggcgctttgcggacgagacccgcacgacggccgaaattttaattgaattatataaacgcatcttagctgccgcgggtgacgccatggtcatgggctgcaactgcttcggccacctcggcgctgggctcatgcacctcaaccgcaccggcgatgacgtcagcggcaaactctgggcacgtacgcgccgcatgggcatgaacacattggcattcaccgcgccgatgcacgaccgcttcttcgccattgacgccgattgcgtaccgctcaccgatgccatcgacgaaacgctcggcatgcgctggctggagcttgtggcaaaaagcggcacacccacgctgctctccgttccggcttcctatttaaacggcgagcgcaaagctatcatccgcgacgctttccgccgcgcaagtcagccccagcccaccgcgcgcccgctcgattggcacgagaccacctgccccgccgtgtggaagctcggcgaggaaacgaaacactttgactggacagagccgtgcggcattctgaccggcagcgtataaattcttaaggacttttcatgaacaaattagacagaacggcttttttgcctgtttcaaaagaagatatggcggtacgcggcatcgaacagctcgatttcgtgtacatcagcggcgatgcctacgtcgaccacccgtcgttcggcacggcgatcatctcccgcattctcgaagcaagcggtttcacggtcggcattatcgcacagccgaactggcgcgaccccgaaagcgtgtgcacactcggcgagccaaaacttggctttctcgtttccgccggcaatatggattccatggtgaaccactattccgtcgccaaaaagcgccgccgcagcgactttttctcccccggcggcaaaatgggcctgcgcccggattacgccgtcatcgtatattccaacctcatccgccgcacgtttaagaaaacgcccatcatcatcggcggcatcgaggccagcctgcgccgccttgcgcattatgattactggtcggacaaaatgaagcgctccgtcctgctcgattccggcgcggatatcatttcctatggcatgggcgagcgctccatcgtcgagattgccgaagccctgcgcagcggcatccccgtgcaggagctcacgttcatccgcggtaccgtgtataaaacgcacatcgcgcccgacggcgacgacgtgctccacctccccggcttcgataagatttccaccagtaaagagctgtatgcgaaaagcttttacaatcagtatctcaacaccgacccgttcacggcgaaaacgctcgtcgagccctacccggacgatcacctgttcgtcgtgcagaatcctccgcagatgccgctttcgaccgaagaaatggatgacacctacgccctgccctatacgcgcacctatcacccggattacgaagccctcggcggcatccccgccattgaagaagtgaaattcagtcttgccagctgccgcgggtgcttcggcgcatgcagcttctgcgctctgacgttccaccagggccgcatcattcagtcccgcagccacgaatcgcttttggaagaagcgaaaaaaatgaccgaggatccagattttaaaggctacattcacgacgtcggcggccccacggcaaacttccgcaagcccgcctgcaaaaagcagatgaaggtcggcgtgtgtaaaaaccgccaatgcctgttcccggagccatgccccaacatggagatcgaccacacagattacgtctccctcctgcgcaagctgcgcgcattgcccaaagtgaaaaaagtctttgtgcgctccggcattcggttcgattacctcatcaatgacaaagacgaaacgttcttccgcgagcttgttaaataccacgtcagcggccagctcaaagtcgcaccggagcatatttccgacggcgtgctgcgtatgatgggtaagccgcagaattccgtctatcgccgcttcgtcaagcgctacaaagagctgaacgaagaaatgcacctcaaccagtacctcgtgccgtacctcatgtcctcgcatcccggctccaccttacaggatgccgtaaagctcgcggaatatctgcgcgacctcggctatatgccggagcaggtgcaggacttctaccccaccccgtccacgatctcgacctgcatgtactacacgggactcgacccgcgcacaatgaagcctgtatacgtcgcgcgcgacccgcacgaaaaagcgatgcagcgcgcgctcatccagtaccgtgacccgaaaaattacgacctcgtcacagaagcgctcatcaaagcgaatcgccgcgacctcattggcacaggcaaaaactgcctcttgcgcccccgccacggtgatacccgttttgctcccccaaagcccgccgcaaacagccataaaccgtttgacggtaaaaacaaaaacggcgcaaagcacggcagaacgagtcaaccgccggcgccccaaagccgccgttggacaggcgagccgcccaaaaagcgcggcaaacgataatgtaagacagcaaaaagctctgcaccgaatttcaggcgcagagcttttgtcattgctttatgatttaatacaaacccggcttgcagagaatctcgtgaattttcgtttcaaggcagtctgccgtatacgccggcgtgatgatacacgcagtatccgcaccacgcgccgagccacccacacagacaaccggcttattaagctcaatcgcgccgttatccagcgccatcatggcaatctccacgcaaaccttcgtgccctgtccgaacatgcgcagcgtgtgcgccatgatctccaccgggtacgcgccgctgaatttacgactgatgccgcgttccgcaccgctcaaagcgtgcgcggcatgaatgatatgcacaccggctgcggtcaactccgcgcgccgctcgtccgtcatggtgttcacgccctgcttcgggtagccgtacgcctgccccaccatgaccatcggcacatttgtcccgagcgcttcctgcattttgatgagttctataagcgtgtcgcccgcgttcgaagccaccacaagcgtcgttccgcgctcctttgcggcgtttaacgcaatgtgcagcgtctccaaggtattctctttgcctttattttcaaaaatcatttttatttacctcgtcagtcatttcgggcctttcaaaatcgcgtagctcacaaatgcaaaccgcatgctgtctccggcccaggagttcacgttgatcgaaccttgcccgccaaacagcgacagaattttgtgctgattttcgccgtccgcatccatcagccacagctccaccggcatgttcggcaggtgctcgtgcggctccagctgctccgggccgtaggaaatatagaccacccgttttccgtccggtgatacatgcgggaaccagttgttccgccggttttcggtgatctgcgtctgctcgccgccgtcccgctccatgcgccaaacctgcatcaagccggagtttgtagcgttataccaaatgtactttccgtccggggaatactccgggccgtcgttaaagccaccctttgtcagtcgcttttccgcgccgccgttcaccgggatcgtgtacacgtccacttcctgcctgccgtcgatgtcgcggaaagcgcagtaggccatctccgtgccgtccggcgaccagccgtgcaaaaaactcgggctgttcggcgtcaccagacgaggctcaccgcctttcatcggcacgatataaacacgggaagtaaagtctccgttgtcaaacgtcatgtggctgaccgcaagctccgtttcgtccggggagaccacatggtcgttgttgcattggtcgcagctgccggtgtcgagcagccgttccgtattcgtgttgaggtcataggcatacatgtgcccctcggcgttataaagaatggtatcgctgtttttcagccagttcggcgcctcaatcacgcggtcaaaacttgccactgtgcgcaccgcgccggtcttcacgtcgtaaacattcaaaaagctcaccgtgtcttttcggttttgggcaaacccgttcagcatctgacaaattttttgaagctcgcccggcacatcggaaccaaagtgctcctggtcgacaagctgcggaatgtcccgactctgggcaaaacggaagcacgcggcaaggtccacgttgcctgtgcccaccggcacgtcaatcggctcgcggcccgcaccgaaatccttgtggtgcacggaatgcacccgcgctgcgttgcgctccaaaaatgcgaccgggtcttctccgccaaactgcacccagcccacgtccacctgtgcgcctaccttgcccatgcaaaggtcaagcaagtgttcatacgccgtcttgcccgcgattttcgtctgtatatccccggcctcattgtgcagcagcaaccgaacgccgaacgtctccagcatatccgccgctttcatgtagttcaacgccgtctgctgcaagatgctttccgtactgttctccggcgttttcaccacaaactgcttcagcccggtcttctccgcaatcgccttcagcttatccatagactgtaccaaattctccgcaaaaacatggattgatacaatccgcaggcccatatcccgaatttcttcgacatgtgcaagcagccagtctgcgggccagatcacgccctccgggccgagaattggccccgtcgtcatgcagggttcaatttctgtaataccggcctttgccaacgcagcaagcttctccaaaacctcgccctgcatgttgttgagcgggccgtaaagctgcacaccaaatttcatgctttcaactcccccagattataatgggctcttacgcctccggcgtgtggtcgtattcaaatccgcacttcgagagccattccttcgccatcagcgtcgcgccgatctggttcgggtgcacgcggtcccatgcgatgagtgaggagtgtttatactgcaaaaacttgtcatacaccgcttggaagttcacaaaacggcagccgtattcttcggcaaggcgctcgcagatgtccacatattcctgcattctggcacgcataaagtcgctcttgttcggctccatgtagtacggcgtgcagacgataacgcccttcgcaaccattttcgcctgctcgatcatcgtgcgcaggttttcttcatattccaccgggtcaaccgcctggtcggtaagcgccggagaatcaaactgccgccacacatcattgatgccgatgcagatagacacccactgcgggttcaaggaaagcacgtcgcgctcatagcgcgcaagcaggtcttttgacgtattgccgctgatgccggagttcgtaaaacgaatgctcagctccgggtaagtcgccgtcacaaggctctcgatgacgcgcggatagccgtgacccatgttgtcaaacaagccctcgcccaccggctgtgcgctgcccatatccgttacggaatcccctgcaaaaataatgcggtccatattttcaaaaatcatggtaaactccccctaaaagagtaaatttctgattatattataatcggatttctacaaaattacaagggcactgtgcaaaatacctaccacgttgacaaagccgctcatcggctttataatttgtttatcacttcgtatttaaaatggtcgatcgtatcggcgtcaccctccgcgtccgcccgtttgaggaataacttcaaaaataagtagcgcacgactcaactcattcgggtctgtgcgtggaacgcacacattttcactattatctattacttattaccttaactaaaaactcccccgaacaagacggcttgtgtgccgtacactcgggggagttttattctataactgtcaaatttgtttctctttcaactcgtttacgatcaaggctatcgcttgtatctgtgtgtcggtcaacccgtcaacattgatcgttctgccggaggatgcaccgagaagataatcggtgctcacgccgaaaatagcggcgatacgcagcaaaacatcgtaaggaggcaggtgaacgccggtctcataggagcttacgaccgatttggaaacactgagcttttccgccaatgcgctttgggaaaggttctgccgcgtgcgcagaaagcgtatccgttcaccgatttgcggcatgtacataagctgaaccctcccattatgaccatagtatctccattataatggtaaaaagtcaactattgtaaaatttaattcctgaaatagttgactttttcaataaaaggtggtaatatgtcggcgaaaaaggcaaacagccgaaatttataatgttttagggggaaaacgtatggaatggatcatctttgtggacttaggtttggtggttgctgttgtcgccattgcagccattctggcggcgataggtgtagcaggcgtagttgtatggatctggcccgcggtaaaaattattgtgggaattctctttgcgattgttatgattgtaggaatatatctatacgttacagaagttataacaagtgaacgcagcattttcacaaaaatatacatattcttgctttgtgctgtaaatgcgatatggagtggagcgttggtgtggatatttgtcggactgatgactgatgaatttacacacggtaatttgattgaagtaattattataattttacttggaattccgattgtaggcttttgtacgcttgcaccagccctcttttcgtggtgtgcagccggactagcaatagaatcagctaatgaaacgtctatatcaaagtgcgttttgtcaacacttctgacggctgtttgtatagcggtacccacgttgatttatgtgttttcagcatcacatttcttttcggtcgctaagtattttccaaagtttattcaaggtatctttgcataaataaaaagttaaaaggagcagaaaccgaggtttatggtttctgctccttttaggtttttggaaaaaacggaagtctaacaaagccgcgcctgcaacaacgtgaaatacttacactaccgtataaacgtgaagttttgtgtttcgcgcaaagtgaagttaagcgtgtttctccccacgtccgcagatacttcccaacgcccaagaattttttgtgaaatattttgcttatgcaaaatgtgaaataatgcttacgcattgtgaaattttctacttacgcagaaagtgaaataaaattcgcccttaacgcgcgcagcgcatttcactgcccgtagggcaatttcacataccgaaggtatatttcacaaatcccgaaggaatttatttcacaaaaaaaggaccttgcaaaatgcaaagtccttttttctggtggaggagggtggattcgaaccaccgaagctagaagcagcagatttacagtctgtcccctttggccactcgggaactcctccatatacagagctgcgtaaacgcaaactcatattataaaaacgggaaacccgtttgttgcaagacgaacacactgctcgcttgagacaatcgttattataatacatcggtacgcaaaagtcaaccctgtttttgcgaaaatttgtgttttttcgcgggggaaagactttgcggttctggtttggcttgacatcatcgctttggggcggtatactgtatttattgcggcaggaagctgcgggggcgttgaagcgccgaatcttgtttttataggattaaattgtgccagcggaggcgcgcgaactttatgaggttcgtgcgcctttttgattttaggaggaatctgcatgaagactttgtattttgactgcggcatgggtgcggcgggcgacatgctttcggcggcgcttttagaactgtttgacgacaaacagacagtgctcgacgagctgaacgcactcggtatccccggtgtggaatttaaggcggaagtgagcacgaaatgcggcatcaacggcacgcatctttccgttacggtgaacggcgaggaggaagaaagcgctgacgtgcacaaccacgaacatcacgctcacgaccatgtacacgcacatgaacattctcacgaacatgaacatgaacatgagcatgaacacgaccacgatcacgatcacgatcatacgcatgagcatgaacacgaccacgggcatcaccatcacagcagcatggcggatatcgagcatatcatcgggcatctgccgttggaggatgcggtgcgtgcagacgtgattgcggtgtataagctcatcgcggaggcggagagccatgcgcacggcatgccggtttcggagatccactttcatgaagtcggcacgatggacgcggtggcggacattacggcggcgtgcttgctcatccgcaagcttgcgccggagaagattgttgcgtcaccggtgcatgtaggcgcgggaaaggtgcgctgtgcacacggtgtgctgcctgttccggccccggctacggcgtatattctgcgcaatgtgccgatctacggcgggcgcattcagggtgagctctgcacgccgacgggcgcggctttgctgaagcactttgcggcagcgttcggcgatatgccggttatgcgcgtgcagcgcgtgggttacggcatgggcaagaaggactttgaagcggcgaactgtgtgcgcgcgatgctgggcgaaaccggcgacggcgcggactccgtttacgagctgaactgcaacatcgacgatatgaccgccgagacgattggctttgcggcggagaagattcgcgaggcgggcgcggtggaggtcttcacgaccgccgttatgatgaagaaaaaccgccccggcacgctgctgacggtgctgtgccgcgaggcgcagaaggaggccgttgtgcaggcgattttcaaacacacggcgactatcggcatccgcgagacgctgtgccgccgctatgtgctgacccgcacggaggagacggtggagaccgccctcggtccggtgcgccgcaaggtgtcttccggttacggcgtgcagcgcgcaaagtttgagcacgatgacctggcggcgctcgccgagaaaaacgggttgagcctcacggaagtgatggaaaagattgatagataaaatataaaggtttatgggcctcgcgttttgcggggctctttttctgtgtgcggcaaaacttgcaaaagtattgcaaaaaaactgcaaaagctgtacggtttatattgaaacagtggggcgggtgtggtatgctctgggcgtaggaaggttacacaaaaccgaaaggagcattggttatgaaacggacgttaaggacgaaaatctggtgtgctgcgttggcagttgcgtgcgtcagcggcgtggcctttggcgtagcaaatttgccgcgtgtgcaggcggacacggtttcggaacgtgatgac

SEQ ID NO: 1696 - DNA, 2174 bp, Unknown
  gut microbiota DNA sequence
tcttcattccacgaatagtggattttcaccttgccgccatccggaatgcgaaacagctccttgtaatggctgtcaataaaacggattcctttctctgcgtccttcaggtgctgatcgagccaatcccggcgatagcaatagcagtacaggttgtattcgcccctgtccgggttcaggcgcagaaggtaggtatacttttcggtatccacacgaacgccatagtaacccggctcctcctgcatccggctttggggtgtgcaatagcagtacttggcaagcgccctgcggttatgaagaatgtcgccttcctcacgcagagagttgattacatcatcaaactctgccttgaactcatcggttttcagctcctcccggaaatcaaaccagctgctgaaaaagccgttgccgtctgtatccatgtctgcccggaggtggccgatcagtccggtttgcatggaaatctgcgtgctctggcgaaaggtatatttgtcctccgcctcgatcattgctcttttttcatactcgatcatcttgcgtcacctctttctttagtcggtttcttttcctgcgcgtgcatctctttcgctttctccaagcccttctgcgcccattcgggaaggcgcttttcctccatgacaccgagaaaatccgtgcggtaaaaggaggtctttctcccgtcgtacagagaaatgcagcagcaggtacggcctcgcgcatttgcctgcgcgccgaagccgccggtacacagcataagttggtgattggcgtggcggaactcaggccggagaatgctgcccttgacgacaaccaccttgttctcaatggaatctttgtaggaaaccggcacgcagctttctgccatgagttcctcatttatgccgacctcctgacaggctctttcgttttcctgaataatttcctcggctgcgtctgctacgcgctgtccgaacacctttgcaatctccgcaaaatcgtcgctgaccagcaccccggaatagcgctcgaaaatggcgttggtctctacaaagcagcacatataccgttcatccttgtcggcgttgggattctcgcccagagcaatatccttgtgcccgatatacatggaatactttacggagtaatctccgatttttcttgtctcttccatagcgtctccttttataagcggggcggcatctgtaaaaagatgccgccccttgccgttttacttcctgttcttcaggcgaagaacgatcagccctgcgataataaacaccacaagaccgatgccgatgatgaccttagcgctcatgcttgcctacctccttcttttttcggaaggtaaagaaagccgccgcacctgcaccgattgcagagatacctgcaagtgctgcccaaagaggcatattggtggtatctccggtcttgggaatatccgtaacaggcttgagcttgttatggaacttggcaacgaccgtctttccttcgtgaacggttacggtgacatttgcgggaagctcatacttttcgttggctttgttgaacacctcggagatcacataatcgccgatgcgcagcccctcgatgtggatctgacccttctcatcggtcacaaagtccttgctgaaggcattgccggtgatatccgagccctccacacggaaggtaaagcccttcagcacgccgtcatccgaagtcttttcaatgcgaatgcctccggtctgtgcctggttgacaaagccctttccggcctcattttccacgacgacggttttaccatcttccttaatggagaagctataggttttctcatcaaggaagaagcccttgggggcctcggtttccttcagcgtgtaatcgccgtagggcagatcatccagcttgtagacgccgtcggacagctcctccatctggcccacgagctttccgtcacggtacacctcaaagactgcgccgctcaggtgatgatcgggatagtctttatccaccttggtcagctgaacgctgccgcgaatgagcttgttggtgatctcgatctcgaccacagcgccgttctgatccaccttcacagtataaggcgtgtcatccagcacatagccctccggtgcagcgatttcacgaaccacatactcgccataagggatgtccgcaaaggtgaagctgccgtcctctgcggaaacggtggtcaggatagg

SEQ ID NO: 1697 - DNA, 344 bp, Unknown
  gut microbiota DNA sequence
ttcatatacaggtcgctggacttcatggcctcggtttggctgatgttgcccacattccgcatttttgtaaatgcggcgaggtttttatagtaatgcgcctcatcgatgaagatacggtcaacgcccaactcctcaaaggtcacaacatcatccttgcgggactgatcgttgagcttgtccagcttctgcttgaccgttttcttggttcgctccagctgcttgatggagaaattatccccacggtttttcttcaattcagaaatgccgtccagcacttcatccagctgttgctgcaggatggcacgctgtcgttccagggacatggggatcttttcaaattggct

SEQ ID NO: 1698 - DNA, 27722 bp, Unknown
  gut microbiota DNA sequence
gtccgataattgcttcgatgttattattttcgattagatttcggcgaatacgcccctcgccctcacccagcccatcagcgcctccaacagcatcacctcggaacaggacaccatgagggaggacgatggtcataataccgtctggttttacatggtacaggtcatgaagcaggaaggcatagtcagcttttcctttcggtgccatgccatagcgatagcggggatcagtttccttgtgagacggatcccagtgctgtgaatagggcgggttggaaaccacggcatccagatacaacgggttatacgtctgagtgacatcatcgtacataggccagtcctgctccaatgtatcgccacagcgagtgaagatatttgctggattgatgccgcgcataacaagattcatacgggtcagattgtatgtgttttccttcagctcctgcgcatagtacatgatgccgtctttgttcttcaggtacttggcagcactcttgccgatggtgatcaaaagagagccggaaccgctcgtaggatcatatatttcgattttctcgcgatccttcaagtggtttgcgacaatctcagacataagctgagacacttcatgaggcgtataaaactcaccggccttcttcccagcatttgcagcaaagttgctgatcaaatattcgtaaataaagcctaaaacgtcataatcctgcctgccatcggtaggaatatccttgatcagctgaatcaagtcgcggatagctttggtttgattgctggtgctgtcaccaagtttgctcagccctgtttccaatgtattaaagattttactgaacacctttttctgcgtatcgctgatcagacgattgaatgcagagagagcagttctcacgttgtcaacggtaaaactatttcccttatccagccatgtcgagaaaagattatcataggcgataaaatagccaaggtgttgctgacaataatcaacaagttcctcgttgttttcatgtacatgttcctggaggtcagtttcttcatatccgtccttctttagaaaatctacttctttgtcagagagaaacttatagaagataaaaccgagaatgtagtccttatattcgttagcctcgatcttggatcgcattttgtttgcggattcccagattttattggcaagctgctgtttgttcataattgttgctcctttgtagaactctgctataatctgtcgaatcgacgatttaggtagattcgtgacaaggggtcagtgcgcccattcgcacccgcgagggggaatctgcgccgctatttcgagttagagtcgctgatataatctgcggctcatttttcgctttcggcgggcttcttgatatatttgccgttcttgattcgcgcgtccgctggcttctctgcgtcctctggaattccccagaccgtgccaatgcggatagcaccggggacgcgcccctcgccgcacaaaatctgaatacggcgggtggagataccccagcgttcggcggtttgcgcgattgataaatacttcatgggcagcactcctgttgcagttcagttctgcgtctgcttataaaatcacagtataattataatcgccaaagcgaataaaagcaagggcttttcggaaaagttcaggaagtattttcaactcaaaaatcaagggtttggggcttccccaaaaatcaaaatgggcgtatcggctgcaaagctgaaccgctcattttccggtgtgtacggacaccggatgtgcttgctactctctcaaatctcatatccgcagatacaatgcgctcccgctttcgcaaaagcaggagcgcaaatttttttgaaaatttctcatttcgatacctgtgtttcgacgaagaaatgtccgttgtaaagtgaggggcaacgaatcgccaatgccctcgtcttcaaaattttcttttcgtcactaccaagtttttgagaaaaaatgtccgttgtattgtgaaaggagtgtttcaatatgccagaccgcacgcgacccatccgcaaggaaatctgcctgaacaaacaggagctgaatctcatccagcacaaaatgcgccagctggggacgcacaacttcggcgcatacgcccggaaaatgctgattgacgggtacatcatcaaggtcgattacaccgagcagaaaaagttagctgccgctgtcaacaggattgccacgaacatcaaccacgtctgccaccgcatcaacagtaccgggcatttttacgatgccgacgttgccgagctgaaagcgcggcaagccgagatctgggaactgctgaaagtgcggcagagagatgagctttgaccacaacgggattttccatgtgtgggttttccgtcaccggttttccggacggtggacaagctgacgctccggagcgtaccacaaccggatttttggagcatggatttccaaactgtcacaggggatgaaattcatacccaaatcaataagaaataaatcaacgctcaatatagtcatccatcaatcctatcaatactggttttgatggatgggataggaggattatgttacagaagtttttgaagtttacaagcgagagcttgtcggcatcctacataccgtttccacggtttttgatggaggatagtcttgccgggctgtccaacgatgcaaaagtgctgtatgccctgatgctggatcgggcgagcatttcaaaagtcaacggtttttttgaaactgacggcatcatccgaatttacttcaccgtggaacaggcgcagaagaagctgcaccgcagccgacaatgtgcgacgcggatatttcatgagcttaagttcagcggtttgatctgccgaaagaaacaggggcttggaaaacccgcattgattacgctgaattatccctctaatgcgaagctgattcagccgaagaaaggcagctcaatattgtccggataaaggtcgaaaacgtggcatttttcgccccacaatcggcgcgaaaacacaggggaatatctttttcttacagcaacgccaaaacgggcttatacgcgctacagaagcgataaaggaggtaccatgtgaacgcagaaaaaacgaatatcccaaacagcgtggatgcagccgaaattccggaatacgtctttgaatcgctggcgcggagtttgcttccggtaattcagaagtactacgaaagcgaaggtggcaaaaggcatttgccgaatggaaagcaaagaaggagatttcagacagtgcatctacataaagaaagcgggaggattgccatgatcggcagtcctcccgcttttttcgttaccagtcttcaatttcctcaacagaaacaacaaatccgaacccatgaccaatcggcacaaggttcggattatattgttttggtggagacggacgggatcgaaccgttgacctcttgaatgccattcaagcgctctcccagctgagctacgcccccgtttggtacttgaagattataacacaggcggttacaaatttcaagcccttttttgctttttattgatcttttttcgcaaagcgaaaaatatcgccgtttattcgatgctgtgaatgcggtatgttccgctttcggcagctttgtaagcgaggccatcttcaaagacatagccgctttcaagacgaataacgccgtgcatggtgcttggcagctcaaccgtcaactcaatgacgtcgtcctcatccctctcccatgcggaagcgatgcggcctgcgggtgcaatgtggaacgcttcggcatgtgtgaggcgcgagatgaacgacgggcggaaatccacctcattcggttcaccgtgcggcgccatgcggataccggagagcgcctgcgtaaaccagctgctgatgtcgccccagaagtggtgattcagtgagccgatgcgatcactgccctcgggctgaaacacctcccacagcgtcgtggcgccgcgcgcgatccagttgccgtaggacggataatccgggcgggtaatcatggagaacgcgaggtcactgtacccgaaatccgtcaaaacatggaacagcacacgtccgccgagcacgccgacattgaggtgatactctttttcttcgatgaggttaataagctgctcaaacgccgccttgcgctctgcgggctcgaagatgttgtagtagatggccatggcctgcgaagtctggcagttgccggcagcgagcatagtgttctcgtcaatgagatacttgcgcacggcagctttccagcgcttagaaagcgcgcgggcaaacgccgcctgctccggcatattgagcttatcgaacagaaacgcggctttatccgccatgtcctttgagagcaccgtatcggtgaatgcgagcggcgatttatactcgtgcgcttcgcgtcccggcgggcaccagtcgccaaggccgatggcgagcaggtcgtgctcgtccatacgcgttgtgaggtagtgcagatatttgatgatcgccggggcgcacagtttgacggaatccaaatcgccgcggtactgatacagtctgtacggcagctcaatgagcacgctgtcccatgcggggccgttgccccaagcaaagccccagccgcttgtgggtacgatgccgggcagcgcgccgttatgatcctgtgctttcacaatggcacgcagccattcgcggtagctcttttctgcgccgaggttcagcaaaatatgttcggaagaaagtgccgcgtcggccgtccagccgtttttctcgcgctgcgggcagtccgtcgggaaataatagaaattcgtcacgtccgattggcgtgtcatttgctgcaatttgtttgcggcctcatccgagcaggagaaaccgccgcgctcttcgagcagcgagtgcatctcaagcgctgtgagcaggtcttccgtcgcttgcgcttcggtgatgccgctgacgagcacataacggaagccgtgatacgtaaacgccggtgtatatacctcttccccgtcgccgcggcaggtatacacgtctttgtggacatattcgaggtcgcgcgcccagtgctcacgcttaaaccagatattttccacgtccggcaggccgtccttcaagtgctcgccgtgccgaagttctatgcgctggtcaagctcgccgcgcacgcacaagcggcacacaccggcggtgttgataccgaaatcgtacagatagcccttttccgttttcgtaacagagatgggctttaattcatttacgatgtcaattggctccgcggtacacaggcgcttttcaccgcgcggctgcggggcgcgttcggcaaatttccatgcactgtcgtcaaatccgatcgtattccagccgggtatttccaagcggccgtcgtaaatttcaccgaagcgatagtcatcaaacagcagcggagacgattccgtgcgccacgtttcgtcactttcaatgcagtgcgcctccccgcttttgtccgtgtacgtcaagcacagcgccatttgcggtgcggcacggaatgcagcggtgtcgaaatcccagatgtgcccgccggggttattcgtgaagccgttgccaagccacacgccaagcacatttttgcccgcgcggagcgtgacctcatacgtatcgtaatacacaaggtcatcgggattgctgatgtacggcgcaagacggccctttgtgatgcgttcgccatttaaatacagctcataaaagccgagcgccgtgatgataacgtttgctttggcttcgtgatcggcttgaaatgcgcggcgcagatacggcgcaggcacgtggtgttcaaatgtattgtaagcttcggatgcgcggataaaagacttcggaaattccattttacctcctccaaaaaggactgaattcctcttttatgactgctgtttcgcttttgattcggttgtgggatctacgtagacggtcttatactgcacatagatgaccatgccgggctttgcgccctgcggctttgaaacatagcggatctgcgtgtaatcgaccggcacctgcgcggaatccttcgcgcggctatgctgcgcggcaagcacggcggcttcctccatggcagtctccgtcggcgctttgccgtctgtgacgagcaccgtgtgcgagccggggatgttcttcgtgtgaaaccaaatatcgttgttgtttgcgtccttcattgtcagcttgtcattctggcggttattgcgcccgacaagcaccgtgaagccgtcgctcgtcttgaacttgagcggtgcggaaagcgcaggctgcttctggttctttttgcccgccttgcggcgcacgtagccctgttcggcaagctcggcgcgaatctcatttaaatcacgttcgttttcggcgagggcaagcgattcgaacacgctgtcgatatacgtcagctccgtctgcgcaaggccgatctgctcggtcagcttttcctccgccgttttcgccttgcggtagtttttatagtatttctgcgcgttctgctgcggcgtgagcgccgggtcaagcgcaatctcaagctccgccaaattctcatcatagaaattttgcagctttacggatgtttcacccttttgaatcgcatacatattcgcactgagcaggtcgcccttgatgcgcagcgtgtcgcgctcggcgcatgcggaaagctctgcctgctggttcgcgatcttgcggctcaaacggtcggcgtgattcgcaagcagacgcagaagatcctgacttttcacgcgcatacgctcaatctggtcgcgctcggcgtagaacgcgtcgagcatttcggaaaagctccttttttcactgaccgtcatcgcactgccgtactgacgaatgtccataaacgcgaaatctttcggtttattctgcgggtcgatgacaatatgcggcgtgccggaaacgtttttcgccgtctccatcagcgtcgtcacgtacatctccgtacggcggcgctgcgggggcgtcatgcttttcacatacacctcatgccccagccccgcgctgttttcgacttcgcgcgcaatgatcggcgaaatgccctgcaaaacggacatcaacgctttggaaagctccatatcacgcggtaaagcatcgatacgcgctatgatctcctccaccgtgcaggtaagcatggaaaacttatcctgcgggggcggcaagcggtataaaagcccaggcaacacaagacgctccgaagacatctcggcatccacgcgttttagtgcatcgatgattttgccgttttcgtcaaccaaaatgatattgctgtaccggcccatgatctccacggcaagcgtcagctccacgtggtcaccgagctcgttcacactgtcgaatttcagcatgagcgcacgctccaagtcgggctgcgtgatctccaaaagctttgcaccctgcaatttcttgcgcaaaagcatgcacagcatcggcggctgctgcgggttttccaccggaatcgtcgtcagattgacgcgcgcactgtttgcacgggcggaaatgagcagcttatatgcggcgctgaagccgcgaaatgcgaggatcagctcatcgcggttcggctgaaacacacggtctacgcgcgtgccgagcaaggacgtgccgatttcctcttttaaatgtcgtaaaaatacaccatccagtgccattttataaaaccatcgcttttaaaaagcgcctttctgttctgtttcaaagcgtttccatcggcgggcgttcgctttcggaaacgataaattccacacccgggcaggctgtgtcaagatacgctttcagccgctcgcggtacggcagctccgtgtggtagtgcccggcttcatacaaagccagtcccgcctgctgcgccgcgatggcctcgtggtgcttcacttcgccggtgacgaatgcgtccgcgccctttgcctgcgctgcaagggcatagtctcccccggcaccgccgacgaccgcgactgtgcggagcattttgccgaccgccgtgcagcgcaccgccgaaagccccagcgcttccttaatgtgcgcagcaaaatcctccgttgtcatttcttccggcagctcgcccatgtaggcaatgtccgtttcgccctcttttaaaatgccgcggacgttttgcagccccagtttgcggcaaagcgcatcgttcacgccgtagggatatgccatatcgagattcgtgtgcgcactgatgaccgcaatgccgctctgcacaagcgcataaatgatgttctgcggctgcacggtacgcagcgggttaaagatcaccgggtggtggctgatgatgagctccacgccgatgcttttcgcctcacgcaaaacgcgcggcgtaacatctaagcaaagcaacgtctttgtgacgtcgacattttcatcaccgaccagaatgccgacgttatcaaaatccattgccgtttgaaacggcgcaatacggtctatggcatcatagatctctcgaacggtcatgcgttctcctcctcgccgtacaggtctaaaagcatttgcagcaaaatttccagcgcgctgctgtctgcgccgccgtgccgcatgcccttgatcttattttcgatgttgtgccgcacgcttttggcataacgtgcgctgaacggactgccgggtttgatctgccccatatataaatcaatcagcttcaaattatcccgcttttgatcggtatagtacacggacatcacggagtaaattttatcactatctactaccgcttcttcgcggtcaatcgtaaagcccagcgcggcaagtccctctctaagctgcatagcggtcgtcatcggctgcaaaacaaggtgcttatccatcgcgcacagccatggcgcttccgagatgatacgcaaaataagttcaccgcccatgccggcgatgacaatgtcctccgcctcatccggcagcaccccgtgcagaccgtctgcacacacaaagtgcattttgtccgccacaccgcaacgcgaagcattgttcatggcgctttccagcggccctttgtgaacatcaaccgcaacggcaaacggtatcttgccgctttgcagcaaacagaccggcacatagccgtggtctgtgccgatatcggcaagttttttgccttcccgcacaaaatctgcacatttttgcagacgcgcgccaagggtgggtgctcgttctattctgttttgttccatgagttcctccgaattgccggatcggcgaatttgcttattttgtggcgaagcgcgcgttaaatgccgctgcgaactgctctgcatccataccatgcactgcacaggcctctgcgattgtttcgccgcgtgcggcgggacattcaatgcaatgcatgcccgcttccttgaaaaacactgcggcatctgtctcccgccgcagaatatcgccgatgatggtatcaaccgtaatgtgcataaaacatccccctttaaagatatttaaccaatttaattatacgatgcataagtttgttttgcaaggtgtatcacggctttccgcgtaaatatcgtaaatatttataaagcaatatttgtctttgaactgcaaaatgcccggcagtctcccgccgggcactgatatgcgttttaaagcttatctttcttccttcatgcgtgcaaagcactcgctgcaatagaccggacggtcctcacgcggcttgaagggaacggttgcttccttgccgcaggcggcgcagacagccgtgtacatctcacgttccggctttgctgcattcttgcggttctggcggcatgccttgcatctctgcggctcgttctcgaagcccttggatgcgtaaaattcctgctcgccggctgtgaatacaaattctttgccgcattccttgcagatcagggtcttgtcttcgtacatgtgtttttacctcgctttggtcataatagaatagaatgagttttgcccccggcggatttgcaccgcttcattgaaaaacaacgccatcaactgtggaagggcatatacatataaatatatagaaaaggtatccgcgcgaaagtcatcctttggcgtcattgtttttctgccgcagctttttgcgtacacgcgccatcgcgttatcgaacgcacgcgccgaaatgccgagttttctctctgcttcctgccgcttatagccgccaagatacaaagaaagcacacgcagctcaaaatcggaaagtgaaatatggataacagaaagcagccggtccatctcgtcacggctctccaaaagcgtttgcgggtcggaaaggcggtctgccccaaggtcttccatctcctcaatgggcacagcgttattgaggaaagaatttttcagactggagctacgccgcacggcgctgacaattcgattgttgatgcaccgcccggcatacgtttcaaacgacgtcctttcgctcggcttataggaattcgccgcgtctaaaagccccaaaagcccctcctggtacaggtcttcccgctcaagggaaaaaatctcgcgaaaactgcacgccttgatgcggatgaccttcaggtagcgcgccgcaagctccgaaaacgccgcgtcatctccgttttgaaaacgaagtgccagcgcctcatcgctgagcggtatactatttttctgcccggtttcctgcatgagaacgctccaaatgactactgtttctttatcatactccaaacccttacggaagtcaagacaattcttcctatactgtacaaaaatgctcgaccgaatttttacatttatatctatcctgcaaacttaaacttctattgccaaaattcgacaaaaagtatataatgcagacaagaactgcgaaaggcggtaaaaatatggtatcaaaagcattcagcatgggacttttcggcatgcacgcgttcaaagtggaagtggaatgtgacctttctgccggtctgcctgcctttgaccttgtcggcctgccggacgccgccgtaaaggaatcgcgcaatcgcgtgcgcgccgcactgaaaaactgcgggttcgatttccccgtcagccgcatcacgatgaaccttgcccctgccgacgtgcgcaaagagggccccgtttacgacctgccgctgctcatcgctttattaaaagccaccggccagctgaatgtcaacacggacgactgcatttttgcgggcgagctttcgctttccggtgcgctgcatcctgtgcgcggtgtgctctccatggcgatagaagccggaaagctcggctacacgcgcatgtttgtgcctgcggaaaacgcctatgaagccgccgttgtgaccgggctttcggtctaccctgtgccggacgtgttcacactcatcgaccatctgcgcggtacaaagccgatcctgcccgccgcgccgtaccacagcgatccgaaaaatcagccgccgctgccggacttcgccgacgtaaaagggcaggcacaggcaaagcgcgctttagagattgccgcaagcggcgggcacaacgtgttgctcatcggctcgcccggttccggcaaaagcatgcttgcaaagcggctgccgtccattctgccgcaaatgtgctttgaggaaatgatcgaaacgaccgaaattcactccgttgcgggacttctgccgagcaacaccgcgctcattgaaacgcgccccttccgctcgccgcaccataccatctccggcccggggctttcgggcggcgggtctatcccccgccccggcgagatctccctcgcacacaacggcgtgctgtttttggatgagctgccggagttttcgcgcagctccatggagacgctgcgccagccgcttgaggacggcgttgtgaccgtctcgcgcgtgaacggcacggtcgcattcccgtgtaaatttatgctcgtcgccgccatgaacccctgcccatgcggctattacggtcaccccacacgcccgtgcacctgctcggagaccgctgtggcgcggtacctcggccgcgtttccgggccactgctcgaccgcatcgacctgcacattgaagtgccgccggtcgattttcgcgacctctcgaacaccgcaaaggaggaaagctccgcgtccatcaaagcgcgtgtggatgccgcacgggatattcaaaacaagcgttttgcgaacaccggcatcacctgcaatgcacagattccgccggaaatgctgcatgaagtctgccgcaccgcgcctgctgccgatgccctgctgaaaaacgcatttgaaaaattcgggctttccgcccgcgcctacgaccgtgtgctaaaggtttcgcgcaccatcgccgatctcgataacagccgcgacatcgaagcgcgccatgccgccgaggccgtgcgctaccgcacgctcgaccgcaaatactggacgagatagaattatacaaactaaaaagcagttcttcctcacggaggtcacatcgcgtcagctgtgaaaattctgccgtttacttcaatactcctcttccttgtgtttttccgttcatcccgaaatttccttcaaaagcgcggtgcagccttcataaacatcgcgccaggtcgcttcaaaatcgccggtgtaccacgggtcagccacgtcgccgggacgattggtgtgctccatcagcaaagagaatttatgctccgggtcacctccgcaaatacgctgcatgccgcgcagattggaactgtccatgccgatgatgtagtcgaacttatcgtaatccgcacgcgtcatctggcgcgccgcatggccgtcgcagcgaatgccgtgttccaaaagcttgcgctttgcgggcggatacaccgggttgccgagttcctctcggctcaccgccgccgaagcaatctcaaatgcgccgcttttccccgcttttgccgcaaggtctttcatcacaaactccgccatcgggctgcggcatatattgccgtggcaaataaataagatttttgtcatttttgttcccctatcttcattttgactgtaccgctattttaccatattcccgtttcattttccagtgtaaacagaagccgccgtgcgcgctcacatttctgaaacctacgccgccattatacggttgatttcggagtggtctttccccacaaaaaagcagctgctctttgttaaaaagagcagctgcttttctatgggatttgagtgaaaacttgtacgcaaattaagaatcaagaatattatggataccctgctgaacggtttcatagtctttttttaaagacgccaaccgttcccgcccggcgttttcaatatgatagatcacacgcatgcgggaacgccccgtgctcatgcgcgttacgacctcctcgccggtgatgtacccatcatccgccaagcggtacagaagcggataaaaagacccctcctgcactgtaatgaagcctttgcttcgctccttgattttctgcacaagctgataaccatatgcgtcttcttcacacagcaaaaacagcgtgagcatttctatggagccttttttcatggtatcgatagccatagtggagataccctctatcgagtaatagtttacagcaaattgaattacaaatcaatacctattttcaataaagtgtattagcaagcaaactttcatgtgctatgataacagcacgcagaacatacgcaatttatactgttttaaagatttatatatcggcattattgtcttagttgtcaagcggcgcggcttcttcgggcacgtcttctgcttcggcttcaacgggcagcaccgcaagcaaatcgagcagaccggtacgatcatattaaccgaaatgttcctaaagaaaaaatgccccgcaaagcacttagcaaaatgagcaaagcgcagatacgccgttttcgtgcgcctgcgctcttattttcgtatttactttctgaaaagcttatccagcgtcttgccatccttacttttccattccacccaaccgttcgcacttgtaccgaggacgaacatagcggccgagctcggcgacgaaaacgacatcgatttgttcagcacatattcgctgtttacatcggtcacgtctccgtttttcagaactgatcgtctctggcgcgcaatggccggtgaaaggcttttatattccgtgcgcccgatacgcgagccctccagcacctcgaaccgctcgccgttatacacgccaaacgcttctatgccgttgcgtgttgtatgtaaaaccgtttcttcgctctgcatcgcttttgcatcgttcattttatagcccagcgtcgccatgatgaactgaatttcatcgtagacttcctccacagtggcaaggtcatattcgtcgatctcatatttcggcacaacactgttttccaccgtgtagcgcttggattcctgcgctttgatgatcgcgtatttttcaagcccgctgatcatatccagcgtaaaggtcttgctctccgccaaaaacatgatggctttgttccaaaaatctttcgagcgattgtggtcgtccagccgcaaaatgccgttgcgcgtctgaccgatgtaaatttgcgcgatcctattgtcttcgctctcatttattaaataataaatgccgtgccggttgatgcccgtaatgttcttcgcttcggaaagcagtgggcgcggtatcacatacgtcgtcatggtagataaactgcggcggatggagcgaataccgtccggctgtccgttgtgataaatcgtttcaagctttttgctgatgcccatagtgttttcctctgctcatccatcaaattcaagtttatatatgtattataccacataacatactttcgcgccagtgccaaacgtatattatatgaaacttctgtaaatttcgtcccaaataaattgccgcacatttttaacgccacaccagccgctgtccgacgggcgcgtatacatcgagattcctgatgtcggcatgaaatctatgatgccaaaaccatgaccgtcctcgcttctgtgccgggcggcttcatcgagaacctcaacgcgcagcccatccaaaacaaaaagtaacgcaaaaaattaaaaggctctgccgcgcaccgatttgatgccgacaaagcctttttctcgttttagggtgttaaatgaatctgaaatacatacctgcactgccataattgcagtagtgctcgtccgtcgacatgacatcagccttgctgatctctcccgtgatcagtttttcgcacagcactaccatatcctgcacaatctcgagccgcagcgggttgtagtagaccgacctgcccgcaaggtaatcctgctggtgctgctcgtcgcagccgttttcctgaatggaatgcccgccgaaccacgcataatcgcgcagcgcctccgcacgcggcaggaagcactcaaggttctttttgtagctctccaaaaccttatacatgtctttttccgggcagatcatcaaaacgatatacccggagccgatggcgtcgccggtaaaaagtgccttgtagtgtgcgcacgcgaacaccacggagttttccgtgtgcccgccgagattcagcacatccaccgtcacaccgccgccgaggtcgatcacgctgccctcgtcaataggtacaagctgcgggtatttgccgccgtcggaaagcgccgccgcaaaacagttttcgtcttcgcggatcttctccacatcgtttttgtgcagatatactttttcaaatcggtcgatgcggaacatgtggtcgcggtgcgggtgcgtaatcgcaacctcgaccggcaaccgcgtcagcttcttcacggtgtcgagcaggtcgccctcgcccatgcccgtgtcgatcaaaagcgccttatccctgccctcaatgaggtagcacgtcgccgtaaagtagtcatctatccgccaaaagccgggctttatccacgtcacttcaagctgcgtgcgtctatcctgctttagcagccaacgaacaattcccccgtccgcaaagacattttcccatgcgttttcagggttgatctccgtgcgctccaccgtttcggagcctgttacgcgcaggctcatcacaagcttttccgcgtctgcaagcaccttgccgtctgcgagcacattgccctcacccgcgaacgtatacaccttcagcggcatgaattttgccgcgcgtacttcataggggtctgcgtgcccgccgagaatcgccgccgcgctgaagaaatgcgacaaatgcgaaatcagccgccacgccgcgtccgcgcagctttgcgatgccgtgagcgacaatttacatttgtcgatgatgcccgtcgtctgccattcaaaaaccaagctctgcaccgctgtttcgggcaatataccgcccggtaaaatcaacgcggttacctgtgcttctccgcaatgcggctcgagtttacttaaacagctttccgcctccgtctcattcgagacaagacacagcagcgtcgtcttcccgccgcccagctccgcgccgttcacgcaccatttgagcacctgtccgtcaaacactttttcaaaataacgcataccttttcctccccgttacaatgacccgctattttgtgaataaaacaaaaagactccacatttctgcaaagtctttcatggtcgaggtgagaggatttgaacctccggcttctacgtcccgaacgtagcgctctaccaagctgagccacacctcgatataagccttgaatactcaaggccatttggcagcggtaccaggatttgaacccagacaaacagagtcagagtctgctgtgctaccattacacaataccgctatctgtttcgctgtctttctttcgtttcgtttgtttccgtcggacaacgtagtctattatagcagatatccgggaaaagtcaacccttttttcaaaaaaactttaaaaatttgaaatttatttttcgagtgagaattaaaacgcgtaaaaaagcgcggaattatgcggtttttttgccttttcagccgtttacgggctctgccaaaaaacacgcaccgaatgccttcggcatacgctttgcggcattttccgccaagcttttttcagaaaaaattccaaaaaccgcagagccgctgccggtcatcaacgcatttaacgccccgttttcgcacagatatttttttatctcctgcacaacggagatttgcagtgcgtcgtcaaaccgatttccgagctcgtttgcaatttcctcaatcgagcgatgctctaccgcgcgcaccatacccggcgtgtagcgcatgccgccgtccgacacgttatcgcacgcacggtacgcttccggcgtgctcacgcccacgtccggcttcacaacgacaaggtaacacttcggtatctctgccagcggcagcaactgctcaccaatgccaaggcaacgatatgtgccgtttaaaatgcagaacggcacatctgcaccgatgcgcaaaccgagatacaaaagctctgccgtattgagcggctcctcccccgcttctgcgcacagatgattcaataatttcagcacggccgctgcatccgcactgccgccgcccatgcccgcctgatccgggatatgcttttcaatataaatatctgcgccgaacggcacaccggtagcgtcaaaataatactgcgcagccttgtatgccgtgttgcgcccgtcgcacgggatgtgcggcttcgagcacttgagtataacctcccccgtatcgttcagcgtcacgcgcacacggtcgcagagagacacggactgcatcaccatgtcgaccgtgtggtagccgtcctcgcgccgcccggtaatatcgagcgataagttgatttttgcataagcattacattcggctgtgttcatattcagtcctccctcataggtcaaacagtgaaaaccgcttgatattgatgacgtgcttcgggcacatttcgtggcagcagaagcaatggatgcacttgctgtactcgatgtgcgccttgtgttcccgcaccgttatggtgtgctgcgggcagctttccgcgcacttgccgcagcccacgcactgtgccgtgttgatcttcgggtacggcgttaaaattctctttgcaagcggctgcatgaattttggaacgcgtgtcgtaaaatcgatgctgctggagcgtgcgcgcttaaaatcgtgtacgacaatattctcaaaatcgtcaccaagcacttcgatctccgaaagctttcccgcacaaagtccgcgctcctgtgcgtttttgagcaccaaaatttcttcgggcttcatatcgatgagcttcgcgccgaccatatccgcttcgtagggactttcagaccccacaagtgcgccgacaaagcgtttttggccgcccgtaggtccatcgccctccatggcatctatcgcatctataatcgagaaatccgggtgcacatattcgcacaaatcgacgagcatttccgcaaacggctctttttccgggtaacggctgtgcagttccggctttaatagccccggcaccacaccgaagagattcttcaccgcgccggaataacccatcatgccatgggtctttaacttcgcaatgtcgatgacgagcgtctcgcgcggccgcgcgaacagctctgtgacggtcagcgtattgcagcgctttccctccggcagctgcactgccgtgctcttacacgctgtatataacgaaaagccgtatttttccgccgcttccgtatagccgcacgcgcggaacgtgcctttcatgatagacgtattgtacggcccgccgccgctttccgccaccagcacgtccgcgccccgccgcagcaggcaaatcgcgaccgcagccgtcacattcgggtgcgtgatgatggcctcttccggtgcagagcgcatgacgagattcggcttcaaaataacggtcatatgcggttttatgcggccataaaacgccgaagcggtgaacattgcatccaccgcttcggtcagccgttctatgtcataatccgcaagccgctttacatacgcgctcactttaactccttcaaaaatgcgccgatgcggttcagcgcctctgcaaggtgcttgatggaatacgcatacgaaatgcgtacaaagccctcaccgcacgcaccgaatgccgagcccggcaccaccgcgacatgcttgtcgtaaatgagacgctcgcaaaattcatcggacgtcatgccggtggactgaatggacgggaacacgtaaaacgcgccctccggctcaaagcaggtaaggccgagacggttgagcccatccacaatcaaacggcggcgcatgtcgtactggtcgcgcatttcggcaatgtcgtcatcaccgtttttcagcgcttcgattgccgcgtactgtgacatcgtcggggcactcataatgccgtactggtgcagcttcgtcatcggggaaataatctccttcgggcccgccgcgtagcccatgcgccaacccgtcatcgcatacgtcttcgagaagccgttgatgacgatggtgcgctccttcatgcccggcagcgacgcaatggagacgtgcggctcgccgccgtaagtcagctcactgtaaatctcatcggaaagcacgatgaggtcatggcgaatgatcacttcgctcagcgctttcaaatgctcgcggcgcatcacggcacccgtggggttattcggatacgggaaaataagcaccttcgtcttgtccgtaatggcgttttcaagttcttcgggtgtcaagcggaattcgttttccgctttcgttgcgatggaaaccggcacgccgcccgccatacgggtcagcgggtcgtagcacacaaagcacggctccgggataataacctcatcgccctcgcccacaaggcagcgcagcgccatatcgatagcctcgctgccgccaacggtgacaagaatatcggtagctgcggtgtattccaggtcatatttgcgctttaaaaagcggcagatctcctcgcgcagcgccatcaggccgcggttcggggtgtagcgcgttctgcccttttccagcgtcgtgataccctcctcgcggatatgccacggggtgaaaaaatccggctcgccgatggaaagggagatcacgtcctccatttcatttgcaatgtcaaaaaagcggcggataccggagggcttaatcacgcgcgcacggtcgttcaggtatttgctgtaatcaatcacaaaggttgcttcctctctcgtcaatctcatcgtagtcggtgacaaagtccacgccgccgtccttatatttcgtcagaataaagtgcgtggcagtggagagcacaccgtcgatcggcgcgaggcgctttgcaacgaacatcgcgatctcagacatggtattcgccgtaacggttacggcaaggtcaaagccgccggacatcaggcagacgctttccacctcggggaaggcctttacgcgtgcggcaagctcatcaaagccggagtccttcttcggcgtaacgcgcagttcaatgagtgcacttgcgcggtgcacatctgtacgctcccagttgatgagcgtgcggtaacccttgatgacgccgtctttttcaaacttatgaatggcggccgccacttcggcttcggtcatatccagcataacggcaagctcctgcacggtcagcttggcatcatcttgcaagagctttaaaagcttttccattttcttatccatggtgttttatcccttctgtttttattttataaggcctgctgtaccttttgcagcaggcagtgtaatctgttttattcgattggcacctgcaccggcttgcgctctacaaacacggtgtactccttgtaaccgatgtcgctcaaaagctccatggcttcctctacgccgcttgcaatgttctccgtgcagtgtgcatccgcgccgatggtgacaagcttaccgccaagctccttataacgcgaatagacttcgcgatcgggcagcttcggcgcatccgtgcgcaaaatacgggaggtgttgaactccagcgcgatgtccgacttgatgagcgcctttaaaaccgcgtccagctcgtcctgatacggcttgtagctgggcgtttcccccgccttacacatgtagcgcagcgggtaggtgatgtgcgccaatgtatcgaacttgccccactccaccatttcaaggctctccgcaaagtaggcgtgcaaagcgttgtcaatctcctgctcggtgggattatgctcgccgatgtggtaaaaatcgtcgtgatcgcgaatgttgtgcagcgaaccgatcaccacgtcgtagttgcgccccgtaagcgcatcgtgtgctgcgtttaggtcctgcagaggctggccgagctcaatgccgcgcaaaagcttcaaattcgggaaacgttcctgattttgcaacagctccgcataggactgacgtacgacatcgtaataccgtccgccgggaatgtgcggcacgttcatgtactggttgcactcgcagtggtcggtcacggcgtagtaaaccagacccatctcgatggcgttcatgcacatatcgcgcatgttgcgagtgccatcgaacgagcagttggaatggctgtgacaatcggatatatttttgtaacgcaaaagatcatccccttaaagcacttcgacctgtatgctcaaaacaatacacaaattgattttaacacaataaaaatcattttggaatacccaaagcacaagttttgcaacttttcgcctaaaaccgcattgtaaagcaatatgaaagtttcttccgatttccccgcaccgtacctttttgatttttacaccactatttcccgcaaaacgccttttaaaccttgacagcgccccacatttgatagataataaagaaatagaaaaccacagcaaagcgcttttatgttttgcaggaaagggtagggtcattttatgaaagcagtcatcaccgtaatcggaaaagatatggtcggcattctcgcgaaagtctccaccgtatgcgcagaaaaaggcatcaatgtcattgaagtcacacagtccatcttgcaggatatgttcgccatgatcatgatcgtagacatcagtgctgcgaccgtgccgatcagcgagctctccgatgaattcgatacgcttggcgaaaagctcggcctgaagatccatgttatgcacgaagacgttttcaactccatgcacagaatctaaatctattaccgaaaggccgggaatgaaactatgatcgatacacatgatattctggaaaccataaatatgatcgataacgagaacctcgatgtgcgcaccatcacgatgggcatttcgcttctcgactgcatcgattccgatattgataaggcctgcacaaaggtctacgacaaaatttgcagctatgccgaaaacctcgtcaagaccggcgaagacatcagccgcgagtacggcattccgattgtgaataagcgcatcgccgtcacgcccatcgccatgctggcgggcgcaaaccccggtgcaagccccgttcgttttgcaaaggcactggaccgcgccgcaaagaccgtcggcgtcaactttatcggcggctattccgcgctcgtgcataagggctttgcccccggcgattacgctttgattgaaagcatcccggaagcacttgcggaaacggaattcgtttgctcctccgtcaatatcggctctacaaaggccggcatcaacatggatgccgtaaagaaaatgggtcacatcgtcaaggaagccgccgtccgcaccgcagaccgcgactgcatcggtgcggcaaagctcgtcgtgttctgcaacgcaccggaggacaaccccttcatggcgggcgctttccacggcgccggcgagccggactgcgtcatcaacgtgggcgtttccggcccgggcgttgtgcgcgcagccatcaagaaggcaaaagataccgataacatcaccgagatcgcggacatcatcaagaagaccgcattcaaaatcacgcgcatgggtcagctcgtcgcgcaggaggcttcccgccgtctgtgcgtgccgttcggtattgttgacctctccctcgcccccacgccggcgatcggtgacagcgtagcggatatccttgagggcatgggccttgcgcagtgcggcgcacacggcaccacagctgcactggctctgctcaacgacgctgtgaaaaagggcggcgtcatggcttcctcacacgttggcggcctttccggcgcgttcatcccggtcagtgaagacgccggcatgatcgccgcagcaaagagcggcgcgctttccatcacaaagcttgaagccatgacggcggtctgctccgtcggcctcgatatgatctgcgttccgggcgacatcaccccggagattatttccggcatcatcgcggacgaagctgccatcggcatggtcaactccaagacgaccgccgtgcgcctcattccggccatcggcaagaaggtcggcgaagaactgaacttcggcggcctgctcggctgcggccctgttatggaagtcaacacgaattccccggccgtgttcgtcaaccgcggcggccgtatccccgccccgctgcagagccttagaaactaaaaaacataaaattcagtttttcgttcatactatcctcggtgagcaaagcgttttgtctttgttctccgaggattttttatcgcctgcgttcgattttcgccatcggtcgggtgcaggcgaatgcaaaaaggagcagagtatatgctggacgtcatcgctttgattttgacggtgatcggcggcatcaactggggcctcatcggcattttccagtttgatctcgtcgcatggcttttcggcggacagggcgccgttttgagccgcatcatctacacactcgtcggcatcgccgccgtatggtgcatttccctcctgttcagggacaatgacctcattgaaaagtaaatgcaccgcaaaaagccgagacacttcgttttgaagcgcctcggcttttgttgttatatacgtcggttaaaagttctgtctgaaatacgcacatgcgccgagcagaccggcgttattgccgagtgcggcggcctccacctcaaggtcttttgcgaactgctccatcacgccgttcaagatcttttcgcgaagcgggcggataaaatgttcgtcttctcttgaaataccaccgccgatgagcaccatttccgggttgaaaatgtgcacaagaccgatgattccaaatgcgatgctgtcaatccagctgttcaccgtcgcgctgacgtctgcgtcatcgaggtggtcaaaaatcaccttgccgttgacgtcttctgccggtacgcccagcttttcgagcaatgcagcattctccgtaaaacggcgcacaagcgcgcccgtagaaccgtagcgctcaaagcagccgcggttgccgcacgggcactccacaccgtcaaaattgatgatataatgcccgatttcgccaccgatgccgcgtctgccctgaatgaggcgaccgttttcgatgatgccgccgccaatgccggtgccgaccgtaacgacaagcacgttctccttgccctttgcgcgaccaaacgtctgctcgccgagcgccgctgcgttcgcgtcgttgatgacggttacaggcagatgaaaccggtctcccagaattttcttcaccgggctgccgagccagtcgccgagctgtgcacccacgccaataaccgtgccggagttcacatcaatctgccccgttgccgaaacgccgatgccctcgattttcacggggctcttttcgagaacttctcccgcaaggttcgcaaccgtcgtcatgatcgacgttttgtagccgtcaaagctgacgctgcgcgtttcggaaagcagaactttaccgttttcgtccacaacgccgatcttcacagccgtgccgccgatatcaatgcctaaaagcgtactcatgaaatggcctcaacaaatctgcgggtgatgtcacgcgggcgtgtgatggccgtgccgataaccgctgcgtgcaccgggtaagagaacaccttctgcagctggccgcgctcccaaacaccgccctccgcgatgaccggcacgttcagttccgtcgtgatgcgggaaagcagatcgtagttcgggatggccgtgcccttcgtctttgccgtgtagccgcacagcgtcgtgccgacaaggtcaaagccgatctccgccgcgtgcttgcagtcttcatagcaagagcagtccgccatgaagagctgattcgggtactttgcgcgcgcttccttgaacagcgtgtcaagatcaaggccgttcgggcgcggacggtctgttgcgtccagcgcgataatctccacgccggtcgccgccagtgcatcgatttccttcatcgtcggtgtgatatatacatcactgtcgtcatatacgctcttgatgatgccgatgaccggcaggtcaacttcctttttgatgtccacaatatcctcgcaggtattggcacgaatacccacagcaccgccctcttttgcggcaaatgcaaggtggcccataaagtggtagccgtaaagcggctcatccggcagcgcctggcaagagacaattacgccgcggtgaatctggtttaaaatttcctgatttgtcataaaaacgcgtcctttcgtttttgaaaacatcctgtatctctatcttagtccgctttgtacgttgccttgagcccaatttcaaacatacggctccacggcaggaaaatatcttccacggttactttgtccgctacggacgtcatttccgtctttacgaacttgcgcagctcctccaaaacggcgttggccgccttgccgcgctgctcttcgcaccagaagtacgtcatgccccactgcggcagaatgtgctccgtcacgtagctgcgcacgaccgcaccgtagccgaagtcctcgataaaacgctccacaaggaagttctgcttcgcttcggtattattctggtacatattgttcacaatcatcgcgagcaccgtgcccatggagtttgcagaggtgttccagcctgcataacctgcaagcttcatcaaaatgccctgcttgttgagcacgcgcagaagctgcaattcgccgccgttcgtgtaggcattgtcgaggatcgccgtcggaatgccgcgcttcaagcaatcgttcacaaagtacagaaactctgccatattgcgctccacatcatagttgatgttgttcgccggctgatttgcggcttcttccatctcgtttgccggagcggtgatgcccatcacaacgtcggcgtcggcgagcgacggcacagcgatgcagcccgccgccatgacgtggtactttacggtctcattgagacttctgtcctcgtagttcgggatcagctgcggcgccagcgtagacgcatacttgaggtatacgtgtggggtgtttttctcgagcgcgttgatggcgcgggaaacgagcaccatgccgagctcatcggcgcccgggtacaagatcacacggtcattgagcaccttctcgtcgatcttcgcgcgcacggtcttctggtccattgcggtgtatccgtactttgcggaatcgtcctgcgggatgatgagaaaatcaatcgtgccgtcctccacaaggtcgagcgtgcggatattgaagctgccgttaaacgcgcggcggtcaagatagtctttaagcgccgcggggtctaccttggctttcaactcagaaagctcgtccgcgtcacccatgccgagcttttcaaggtgcgtcagacggccgatatggtgaatctctttgccgtaaagctcatagtaatccggctcctcatcgtcggaggaatatttcgggcagcgcatgatgcactggaacgcgtacagctttacctgcgggttcttttcgcgcagttcttttaaaagcatcagacgctccaaaaccgtctcctcggaaagatggtgcaagcgcgagggaatcaggccgccgtacagcagcgtatcgatggaaatgaccgccgcgtctaccttttcgatatttgcgagcaggaaatcgcggatgaattcataagacgccggggtcttcttctggccgagatgctccgggcgaatgatcgtatacttttcgccgttgaaaattttggacgggaaatcaaagttgcaggggcgctcgtcgagcggcagcaaaataatatttttcatggtagtctccttttacgcgcggatgatcttccacgcacgtgtgttgatgttctccagcttcacgtccgcaccgccgccgatgtacaggccgcagtcctccggcacttcaaaatcgaccctgccgggtgcgaagtcaaacacattgcccttgagcggcaggttcttagacggcttacgggtgaagtcaatgtttctgagctccacttcgcggatgttgccgtccacgccgtaaatgcccatggcgttctcgcccatgcaggtcacgccatcaatgtgcacgttgcggatggcgcagtcggtctcgcggtgtgggtcctgctctgccgggatatggtaatcgtgctttacagccatcatgaagatcggctcgccgttgccccaccagttgccggcgcgtacacgcgtgtcaacaatcatgttgctgatgcgcacattctccacaagtgcggatgtatcgttgcacatgaagcagatgccgcggttgctctccttgatgatacagttcgtgatggtcacgttgcggatatggctgtaactgtagccgatgacaattgccttcgagcaggaacgcagcacgcagttcgcgatgacgatgtcctcgcacggttttgcccaatccgtaatgccggaaagcgcaatgcagtcgtcgccgctcgaaatatggcaatcggcaataataacacctttacagctcgcaatatggatgccgtcgtcgttcggcacgttggggctggtgtcaatcgtaaggccaagcagctttacattctcgcacgcgttgaagctgaacg

SEQ ID NO: 1699 - DNA, 13278 bp, Unknown
  gut microbiota DNA sequence
ctaactttttggggtcacttcaaaggcgctgtctttcttttcattcaaaacacgattttttaaataaaatgaaaaaaaattcctgcagaacctgtattgcaataatgttccggagaatctatgaccgatttccaagaaatctttccagaaattaaattgttacacaggcagatcatatccagcataacctgctggcgaattgggttaaaatactgagactcccctgctaaataatcctgctgatgacgcggatcacagccgttttcttgaattccatgaccgcctaaccaagcaaaattcttcagctcagacatgcgagggattattttcatcaggctttcccggtactgctccaccgtctccattgcatgttcttcagagcaaatcaaaagtacaatataaccagatccaatagcgtccccagtgaaaatacatttatgactacgatccacaaacactaccgaatgcgcagtatgaccggataattcccacacttctacgtctatgtctcctaaatgaatcttcgtcccttcctcaataggaataaactctgtatgagaattgttcggataacggaacgttgcaggaaatacatctgatttttccctcatcaaggcaatatcatctttatgcaggtacacacgatcaaaagaatccacccagtgcatgtgatcaccgtggggatgagtgatagccacctctaccggtagattggtgagagacgtcacaagttccgctaagtttccttctcctaaacctgtgtcgataagtaacgccttatcctgaccttcaatcaaatagcaagaggaagaaaaccaatcgtcaatacgccatactccgggtttcagccatatcacctgaaattgatgttttcggttctgttccaaaagccatgaaaccaccccatcttcctggattgccttattccatggatttttctcatacatagatctcatttccacacattccgaacctgcagttaataggctcatgaccagttggtccacgttcactgccacttttcccttccgtataatctgtggttcttcttctaccaaataagcacgaacaggaacattcttcatggctctaacttcatagggatctccataacctccaacagcgcaaattcccgcgaaccactgtggaaaatggcttccaagacgccagacccagtccgctgcggaaagggttcctgtcagagtaattctattttcgtccacgtcctctctctggcgcaatgagtagagccaatctcctacaatctgctcttcggtttgcggataaatcactaaagctgcaacgcttgctccatttgcttgagaaaacagcaaattaagattcctttgcgcatcttcttccttatccgctaggcaaataatcaatggcttttttccagaacttgccccttcttcccaaaagcaagtcatttttccgttttcattcggaatacttagaattttcaaacttaattctcctttctacacttataatttgcaatcacggtcttacagctgtgccgtcagtagtacgagccaaaagccatccgggctcacggtaactgcaaggatacatagccgcctttttctcatcaatatctataccaaaaccgggcttatcattggcatacagataaccattccgcacttgaggacaaccagggaatacctcttcttcctctggggaaaacccagaaaactcctgaattccgaaattcggaatggcaagatccagatgaagttgggcaaccactcccaccggagaaagatctccaggtccatgccaagcagtgcgtacgccgaaattctcgcacaacgccgccaactttcgggcaggcgttaggccacctatctgactgacgtgaaccctgatatagtcgattaatcgcttggagattagctcgttccattcaatcggattattgaataactcacccatggcaagaggtactgctgtctgattgcggaaatggctaaaccaccccatttgctccggcgaaagagcatcttccagaaagaacagttggtatggttcaagtttcttggctaaccctatcgcctgtgctggtgttaaccgctcgtgtatatcgtgaagcaactccacttcatatcctaacttgtcgcgaagatggctaaatagattaactacccccgcacagtactgattcgggtcatagtaagcaccaggcttgctgttttccggagaaatgactcgttgtcttccctttcccatctgaccgccataggttcccatctggcatcgcaggtaacgatatccatcttccatatacctgcgaacattttcttccacctcttcaggagtggcaccgtcagtgtgacgatagaccgacactgcttcccggcactttcctcctagcagatcatataccggcatgcccgccattttgcctttaatatcccaaagcgcttcatctacaccagagatagcgttgttgagtacaggaccgttacgccaataggaacttcccatagctgtctgccagatatcttcaatatcattcacgcaacgtcccaccagcaaaggtttcatatattcctccactgccgtggctacagccgcccaacgttgggtaaatgtggcacagcctaatccataaagtcccggctcactggtctccacttttactactactaagtcaatgcctcggggcgctgtaaggattgttttaatattccgaattgtgaccatatcaaataagctccttttttaaacaattctcttaaatacttcttctgcgaacaaggaatgagctttgctccacccattgaaatcttcctcaggtaaaacatgttccggcataccgggaagaatcagacctccatcaattctcagagtagtgccggtaatataagaagctttttccgaagctaaaaaagccacagcttctccgatatcctcaggcatgccacagcgttccaatggaatcttctttcccaaatcgtcccaaaaatctgtttttccctgatttaccaattcctgcttatcccggactcgaacagctccaggcgctacgttattaactctgatcccgtaaggtgccaaatccaaagcgatagactggatcgcccgattaagtccagcttttaaccctccgtaaagaaaatcccctgcataggcacgttcacctcgggatgatgtgatgttgattaggctacctctcaccttattttttaccatataacgcgctgcttcttgcatcattagtatgtaatttttgaaatcgagatgaaacagcaaatcgaaaacttctggcgtcaagtcaaggatattctcaaatcgggtcactccagcgttatttacgagcaaatccaacccacccaaagcttcaacacttttcttcaataactctacgccaacaccttccttttctaaggaagcctgaaaacagaagcactttccaccatatgtttcctgaagttcgttagccaacttttgagcttcctcctgcttagtagcgtaggaaatggctaagtcatacccttctctggccaagcaacgggcaatcccgttcccaatacctcggctagctcctgttaccactgccttttttcgttccattgcaatacctcctatctgtatatgttaccgcaagaattcgttcctccattttacgcaggacacatgagggacttccacgcagcacagcaactttcccaattgtccgttcgtattttctctagaaaacacttccaacgtccccaactcctgattggctactgctacgtagcgtccatccggactaatatggaagcttcggggacaccagccaccagtggaaaatctccccaaaggatttaacaaaccattctccttttgaatctcgaatccttgcaaacatcccggaccacggacagaaacatacaagaactttccatccggagaaacatgaatatctgctgctaatgaactgtccggatcacccttctccctcagagaatattctcccacttggttcaatctgttattctgataccggaacaccaaaagtgaacaatccaattctgttaccagatacagccattttccgtttggatgaaacgcgaaatgcctcggtccctgtcccgctcttacctgaaagtacggctgttcctcatcaagcatcaagccgattttggcatccatcacaaacttgtatagacggtcagtgcctagatctgctaccaaaagtcgggaaccatccggcgtaggctgcgcggaatgaatatgggacttttcctgcctaagagtattggaaccatgccccgagaactccttataaaacataacttgtcccgaaatagcattcacccccgtgagtgttcctccagtatatccggaaacatacaaactgttcccgataatcgcacagtggcacaatccagctccaggtacttccttatgccataaaacgcttgattcttctttattatccacagaaaagcaagccacacttgctccatcgaggatttcttccacaacatacaagcgatctccatgtggcagtacataagaagggtttattaactttccaaactgtttctttcgtcgaagaaccgccccatcgaaattccaagagcacaccccatcctcggagggttctcccgtgtatcttccggtataaagttcatactccataaattcgtccatccctacctttggtccttaaagaagacaggagcctgctcatgcgtatagggcaggctcctgaattatcgctaacttactatcctgtttttctgtttttcagaaaagaacgcgtttattgctcattcaattcatctaacagaggctgtaccaactgcattttctcatccacccagttgcgccaatttgtctccaaatctccttctttcaaaatcagctgagcatactcttcagacaaatccatgttggcctgagtcttagtacgagaactataaaactcataatcatattcgcgtggcaacaaagtggtttcatcggaaagttcatctcgcaactgatagaaatgagaaatggtatctcgggtctctttagtatagttgggagtcacaaactggaaatcatcacccagaataacgccaccaaagaacacatcggcagtaggatatttgcttgccaaaatagaaccggcattaccagtaatctcattcggaagaaggctgacatattcaccgttttcatcccgcttccaatcttccccttcaaaacccatattgataatttcctgaccttcctccgtgcagcaaaaatcaagaatatccatggctctctcaaactcttcatcggtaatggtgggagagaaaatgatggatccgtagaagttcatgtcctcacgataataatactttccatcctcacctactaactgagcaatatgcagcgcttcatcagggtccagtccaagattcttctgaagtccgttttccattcggctttgaatcatatagcccataccgtcatctaaaacgatgcctgcggtgcctccgatgtataacttttctgtaccttcatatcgagtcaaggtgtagaattcaggatccaacagtccgctggtataaaggttctgatatttctttaatccttccagagtgcgctcgtccgccggcgcccactggaactgtccactttcatctttgtagtagccatcgccgacattgatggattgagggaaatatgtgccgggataaatcttaggaacatcatatgtacgaatactgattggtaccagctggcttcctacattacccggatcctcttccttgaactttgtggcgatctcttccagctctgatgggctatatgtatctttgatttcgactccacaagcttgcatccagtctttgcgcatatacaaaagggcatgataacttaatctcttagaaggacggtgattagcgaagatagttctgaatagtgtgtatgtaccacccagtttttcttccgctacagctgcacctggaacgcattcctgacttgcagctacgttaggccagcgctctttccaatcgtcagggaaacggtaaactgcatcttgggcggcgtagtcaaccaactcaccgtagttgaatccccagtgagccacatcgggcatgtctccggaattaatccagatacgcaagcgttgactccagtctgaatcatccatggtagcagcggtcaagtcaaaagtagtgttgaatttatcctgccaaaactgacccaacgcatctccgtcgtagttaatctcatgacccgtgatgccctctttaaaccaagacagctccacatgagtgtcatatccggtcttttcttctcctgtagcagacgatacccctgcactctgctgagatgagctattctgacttgcattccctccacaagccgctgtagacatcaccatgatagttgctaaaaacgctgttataaactttttgcttttttgcacttctttcatcctttcattttgattcttgatgtatgtcgatccgtcatttttaaataactattaactatcctcctcctttttctatatctatccggaacagttctattaagctttcaccgcccccaccatcacgccttgagcgaaatgtttttgtaggaaagggtacacgcacataactggcaagattgttacgataactgctgccattttcacgcccatgttaaaattctgcatttgctccatagcggcagcactggttacgttattgacaatactggactccatcacaatggatcgcaaaactaactgtaagggttgcagatccgtattacgaataaaaatcaaggcattgtaccattcgttccatcgatccaccaaatagaacaatgtcaaagtagcaataatcggtttggacaaaggaaggataatgtcaaacaggattctccattctcctgcaccatccagacgagctgactccatcaaagattccggcaaagactgaaagtaattcctcataatcacaaaataaaatacattcactgttccagccagaaccactgaccaaatagtgttagtcagtcccatttccttcatctgcaagtacagaggaatgatacccccattaaaaagcattgtgaagagaattccgccgataataatcttttttcctggataatttcctcggctggtgccataagccaacatcgtagttaaaagcatgcttaccggaacgcccaccactaccaataaaaaggaagtgcgaaaacctacccaaatgcggtaatcattgagaagcaatttgtagctttgcagcgtaggctgcgaaggaaagagcatcaaaggattgtctacgtattccttttgtgtggcgaaggaaatagagatggcattgacgaacggaacgatgaccaaaagcatccataaagtcaacaaaataaacaccacaacatccactgcatcgaaccgttttttgtgaatctgattctttcttttcattaacactacctcctcaaccaaataaaccgcttccgcccagtgcttttgcacccctgtcagcagctactaaaaatatgcagtttatcacagaacggaaaaaactgacagctgttgagaaaccgaaatcgggtgtggagccgaatgaaatattgtaaatgtacatatctaaaatttcagatacatcttttactgcggggttagaaaggttaaaaatctgatcgaatcctccagacatcatgttgcccatctgtaatacaaacatcaccgaaatagttgggagaatattcggaagggtgatacggaagattttctgtattcgagaagctccgtccagatccgctgcttcatactggtccatatcaattcccgaaatcgctgccatatagatgatggcactccacccagcagatttccagttctccgtaatatacagcaacggctggaacagtttggcgtttcctgtaaagttcactgtctctccccccaaagacaggattaaactgttcaacaaaccgtcataagaaaggacattgattgcaatacttgccacaataacccaagacaagaaatgcgggaatgtcagcactgtctgcacaacttttttgtatcgcttcattctcaactcgttcatcagcagtgccaatatgataggaataggaaattgaaagattaagcgtccagcatttatccataaagtcgtcccaacggattttaaaaaagatggatcccgaaacacgtattgaaaattctccaatccgcaccaaggacttccccaaatcccctgcttcatgctgtatgttttaaatgccaactgcaaaccagacataggtccgtaagaaaaaacaatgaaccatatgatacccggtagcataatcagatagattgctttgtttttccaaatctcttgccaaagagacttttgctttattgttttttcttttttttccacattcatccgcctttctgttttggaatatttgtcaaaagtttttatggaaatctccaaaatctatgcttaaattatatcgaagaatttttcgtttgcacagggacaatcttttgcacttctcttacaaaattaagattttcctaatttttttcttctgcttcgcttgaaattgtgacttttgtcaacacctttagtctttactctatcaataaatcgcaattctgttactttacatttttctatagataaggtatacttggctaaatactgttctttcgtgcaaaggagatattttatgactggtaaaaaaagcatttctatcaaacattttctgcgaatcagtctcgcagtaatgctcctttttttgtttattatttcagcattatattctctgttcatttacaccttttctagggatcaatttgaaagctcttttcagactttttccgaaagtatagaagcacaacttgacacccagttccgcaacgtggagcacagcgttacacaactctcctatttttccaacatgcaagagattctctttagcaaaaagcctcttgtatatcttaacaacatctccggttgcaaccaactttggggttatttgaaaacatctctgcccataatcactgatgttattatcaccagcccctacggtcacaccttttattcaggtactaccggaaaataccgctatcaggaatttgcggaaaaaatcatccaagacaataagaatatgtcccgtgaaccgttcttcctcaccattccttccggagatgattccaatcaactacctcaactggtctattgctttcctgtatataatactctgcttccaggttacatttctaatgagtacgcattaggaatggcgctaattgatatcaatgcattggtagatctgtcgtcttcggaaaattatgttggggaaattaaggccatcctttatcatgataatattgtttatatcagcagagaagcatctcaattagaaatggcagctttatacaaaagagcccaaggcaagtttcggatagataacgttgaatttacatgccacacagtgatgttggaagacataggcatgtctatgattgacatggttcctactgctaatcttttgcaaagcagtgctcaaattcgaattatcgctacaacggttcttttaggtacctgcgcctgtctgatcttctccacatggcttattcaacattatatttctgtcccaataaatcagatgattgcagatatgcaggatattcaagctggaataagaaaatcattgactctgcccaatttcagtgaccttaggtatttgacagaaagcatcaatcaaacactgaacgtactggacatttccaatcgtcggcaactggaaatgtcccatacgttgtatcaaaccacactggcccaaaagcaagcgcagctaaacgcatataaaaatcagattaatcctcatttccttttcaacactttagagagtatgcggagtatggctcatcattatcaggttcctatacttgaaaatatgctcacctctttatccagtcttttccgatacagccttcggagcagcctagtagtatccttaaaagaagagctgaatcatgtgcaacactatttcaatgtaatggacatgcgttccccactgcgctatgaactacgagtagatatttcttcgaaagcactatcccattcgcttctttctatgattttgcaacctatagttgaaaactccatcactcacggttttcaaagaaaaagaaagccctgtattcttttcatacagggccaagtaaacgaggaaagcggtattcttcttcttaaaattgcagataacggaataggaattcctttggaaaaaatccaagaaatagaacaacattactctcaggaaggagaagctctccataacgaccacatcggtcttgataatgtactccgccgtttgcatttattctatggaaaagattttcggttttctttacgctctcaagaaaatcattacaccgtcattactctttatattcctaattttccttctgagccatcccgataggcttctggagtttgtccaatatatctcttaaatagcttcccaaaataactgtaattctcaaatcctacctcttccgcgatttcctgaagctttttttcactgctccgaatgagataagttccataatggatgcgtacatgttgaacaaaatggataaccgacataccggttccctttttaaacagtgtacaaaaatatggttcggaaaaatgatacttctccgccactgatttaagagagaactcttcattcatatttttgcaaagataaaactgaatctctcctaccttttcactgccagaataagaaaatcccgcccacaatgcataccaagcttcttgtagcatttgaggtaaagaatttactccacttttgtgctcccgactgactccccacttttgattatcctcttgaggcaagttgagtctggacatatgggattttgcagatactctcagatatgcacccccggtgtctttgacaaataaaggaatccacttttcttctctcaatacttccggctcttcgcatagatgagagcaaaggtacaacaccattgtttggtagtttttcaactggtcttgaagcgatcccgccttacgcaaaatttcttctgcacaatcgttccattccacactgacgagatcatttctcttctccaaatgaagtgacaaaactttagtaacactatggatatcttccgcgttatagggctttaaaatgtattcccacacatgcaggcgaattcctttttgtgctgcctcaaaatcttcatatgagcttataagcacaaactcacagttaagcccctttacgcgagacatctcaatgagatccaatccggaaagtccaggcattcgaatgtccgtaaacactacatcaggttcttttttgcacaggaattcaaaagcctcgtccggatccgtaaactggcctataatagaaaaaccttcgttgttccaatcaatgatttctgccagcccttgcaatgcccacggctcatcatcaacgattacaacagtatacataagtgttcatcctttcctgacattctaaaaatgacctataaaaaagcagagcatcagaagccactcctgatgctctgtctttctttcctagttatcgggactcctgcatatcaattagaatggatttctttttgcgtgtgccgtaccattaaacaaaatatcatcagagagttccaccaccatatgcaagtcgctgggagattcgacttgtttgcccaaaaccactacattgtcaaaatagatatttcgggggcgactcatttccgtatgcatctcaaaaccgcgaataatagaaacagggaaattaccattcagaatttccacgttacggaaatatatattttcgacacttccgcgttttcgatccaatgagtacttggaatccaataccttgatgtcgacaaacttttcctgagcatcttcaacgcggatatcttcatacacaatgtcatgaatgtgagcgcgatctgcattgtggatggtcagcacgccgccagactgattaccctcatactcgcaatgaacgatgtccagatctcggaatgtgatgtcgctaatctcatcgcagcgcacttcatatccaatttccacggcgttaccgggttctgcattccacaaaacgcagtgttctaccagaatattcttcacatccctattggcagcagggtcgggataacttgcagctttgatgcacacgcagtcatccgaagcgcgaataaaggaattacgcatggttacgtcttcgcagcctacaatatcgataccgtcacccgtgcaaactcgagacatgatgtttacatcctcaatctccacattccggcaagcgccaggaaccaggtgccacgaaccaccgtccaccatggtgatgccttgaatcttcacatcatcgcaaaacaccatccgaatcattggtctgccgccaccgttttcttctttcggatgccatacacaaccattcagaatgccgtttcctaaaattctcatgccgtgggcaaaaaaagcattcacacaaccacagacaacactgccctcttccaagaaaaccgtttcttccgctttgacctctaacgtgccaacattgtagattttcccactctcaaaaagatgatccactttttcgggcttcgggacacgctttgtgcacaagataaagagcggtgtcttcaaattgccatctaactccaaggtggccttactgggcttttccaatcggaagctcaactctcggccggaaatctgcgcctgaacattggtcttggccggacggaaaaccgccttttggaaatctttggatacttttacctgaaaacttagcggagaatcgtcgtccacaaccggaattacgtaatcaaaactatccgtgtggtaaaccgtcagctcctttccgccgcaaagcacagtgtacaaaggagatttttccagttcctcaactttatacaacggctccgtaattcttgcaggattgggattgtaacgcacagccacttttactcctccttaaaataatagcttttcctttatggaagtgattatagaatatcatgtctggagaatattgaaaacaaacaattttttcttttattcctacaaaattaagcttttactaaattttattagtgaaaacataaagatccaacctgtatttatgccggaattacatcattcacgatgggaaactgtaaaagcatcatgtggcagtcggtatacagaagcttcagtataagtttaggctacaatatcttgcgccgcaagcttgaagccgaccgcacagatttaccgatataaagagccgcttacaaaaaggagccaatcgagaaaatccaatgcctccgcaccatag

SEQ ID NO: 1700 - DNA, 4380 bp, Unknown
  gut microbiota DNA sequence
aaagatgccctgcagaaataagcgcaaaaaagaaaggcttaatagtgacaagtaactattttgtcgcagagaacggtgtgacccgaaggtcacgccgtttttctgtgttcataggttgtttgcgtgatgataggctcggaaataacgggaatatctacatcgtccacgaagttgaagaaaatcttcactttctgcttgcgcttgccgctggatttgtccggggcatagacgatgattttcttgatatactcgttcacgatggtctgtgtcagctcctccacatccacatatttctgtgtcagggcgataaaggcatccagaccgtcgttcatttcttcccgctgttccacccattcttcgataacttcaatttcgagctttaaccgttcctgctccgcttcatagtccgcagacatctttctgtatctgtcctgattgagatttccaagaacatagtcctcgtacagccgggcgatgatgacatccagatcggcaaggcgtttctttgcctgttccagcttctttttgtcatcccggatgctgcgctcctggtcagtcctgcggcattgcagccattcctcctgaaaaccgtccacatcgcttcggatatactcattgactgcccggatgcgttccagaacgatttcacgaagcacatcttcccggatatagtgggcagtacaagtaccacggttgctcttgtagttgttgcagacgtagtgatcctgcttgccctcaaagcttttgcttgtggcaaagtggagcttgccgccgcaatcggcacaaaacagaagcccggagaacaatccctgccgttccgcttttgcggggcggcgtttgtttttcctcagttcctgcaccctgtcaaactgtgcctgagatacaatcgcttcctgtgtgtccggcagataaaacatattctccggctcattgggaatccgctttttcagcttgtaggacttggaataagtcttgaagttgcaggtacagcctgtgtactcctgccgttccaaaatccctgcaatggactggttgccccagtggtacggtctttccggcatcggctttttctttcgcttggcatagagtgcctttgcggtcataatctgcttttcttccagaatccttgcaatctgctccgggcctttgccgtcaatgcaaaggtcgaagatgagcttgactaccggagccgcttcttcatccagaatccagtgatccttgtcctccgggtcacagcggtatccgtagggcggtttgcccatgtgcttcccactggttcctctctgccgcaaactgacacggactttcttgctggtatcacggggataccactcgttgaacagattacggattgcggcgaagccctcgctgtctccccggttgctgtctacgccatcatttatagcgataaagcggacatcataactcggaaagataatatccgtatattgtccaacagtcagatagtcacgaccaaagcggctgaggtctttgaccagccagcagcccacaagcccctgcttgacaagctcaaagccttcctgcacaccgggacgattgaagttcgtccccgtataaccgtcatccaccagaattttcaggtttgtatacccgtggtcacgggcatatcgggttaaatactctctctgatttgcgatactgttactctcgccttcctgggcatcctcgttgctcagacggcaatagagaatggtaattttctgctgatccaacataatatcctccttcggtggttggtcagccgacagtaccgttgtgcatattggaattatatcatgcttttgtgtcgcagtcattaacaaatcacccccttgtcagaaaaaatgagccgttttaccttgtcggtaagtggctcatttccatcacactccgtttcaatcacataccatgtgtttccgatcttgcactcaatggttttgcagaaagaggactgtgccgcttcccaacgcttgcggcattcttccagaaaatcaataggcggctcaaaaatcggatcgaagcaggagcaaatatcaatatagccgatggcatcgttgatttcttccatcggggcatcttccataatcatcttgttaatttcatctacggttttcttcataggcaaatagttcctttcttaaatttccatgtcctgtccacgattgcgggcagggtgtttgtgttcatacagttcctttcccctggcgaggatggcattgataaaagcccagaccttttcagatgcaatctcaatcgcatccaggaaaggctgggctttctgtttcagctcctcatagtctttgttcagtttttcaaaacggtctttccatatctttgcgtttttatctgcctgctcgaatttctgcttgtatttcagcttctcagacttttccgcaaagctgctgaccgcataatcctttagcgtgcggcactcatccgccgtcatggtaacatttcccgtaatgggatttttcttgcccatcgactcaatctcatgtgcagtcatagcaacagacttagcagcctgagtttcctttttcagagcttccagtttctttttctgcttctccgtggcagctttggcatccgctaagctctgctcggcctgtgtcacctgtccggtcacagcttccaaacgctgctgttcggcctgtaccttgaactgtgtcaccgtcagatgttcttcggtgctgccacattctccacgctctacatcggtataaccagcgtttcgcatgaaattgaaaaagtcatcctgcagcacactgtaggacgacttcaaaatctttttcccttttgcgttcaacataggatttccgttttcatcaagaacgggtttggattcccacttcttactgcggctgacctgtgtgatcgtttcctttaccgttccccggagggattcatccttgcatcgcttcgaccacaggatttgtttctccaccaccgggatataaaccacatgaaggtgatagtggtacacatcctcacccagagcttccgacattgcccggttgcgctcgtcggcatgcattacagcggagaggatatactgctcaccgcccacaatctccacggcggctttgtaggcatcggcatagaactgtttggcatattcatagccgccgtggttgtggaagtaggcagagtttacatcaaacagcagctccccatatttcaccgcatcggctttcagaccacgggtggagataacaccatctgcaatcatctgatcgaacatggcggcatagctgtcggtaggtttcttgaagtggacattgcggtgggtctgggtggtatcaatatcttgattggagtagctgtctttttctcgctcgttatgctcctgaactttcgtcacatcgtcgagggtgggcaagtcctggttacgggcaaaggtacggtcaattccatcgtttcttgccataggttttttcctttctttcgagagtagcagacgggcggggctgcggggatgcacttctgcggaagtgtaataacccactataacactttcatccattctggctgcaaagtgccgtgggctctcccgagggggtgtgcggtcactgcggtgacctctgctgaccaaggcaaaatgtctgcaacttttcccatggtcagcccgtctgcatgaagctgttctgcggaacgtttcttgcagacgttggcagcgtctttcactgccatccataggcagcactgcggtgtgcctatggggacgggagatgcgaggggctgttgccgggggcatcacttctcccgtctttgctgccatacaatgtcgcatcccagcacatcggcaagctccaatacttccttgtatcggatgctttcccgctgtaattttgcggacaggttggaaacgctgtcgctccatccgtactcgtccgagagcaggtcaacaacttcctgcatggtcatcccagcacggatgatctgtgccttgatttcattgcgtacattcatattgaaaaatcctccataattctgtttgtggttcggtacaatctctgcaccccaaaacggagcagatacaccgaacagtgaaaaatctgcaatctctgaaatccgttcagaattttgcttgtgatgtcctgtccatatatgaccatatcccgctttactgtttcgtgtgatttggtctggaaaaatgaaaacatctattgttccgtgaacagggtacacggttcagagaagcacgatttcgtgaaatagcttcgtcctgcggtcaaaaactttgctgtttccattgccattgattttcaatacccgaaaacaggttgtctctgaaagccgttgtttcctataatgggagaaaacaggggtaaatgctgcgtacatacgtacagagcatgactggcaaaatcaatcccgcca

SEQ ID NO: 1701 - DNA, 1298 bp, Unknown
  gut microbiota DNA sequence
acctttctattcccgctgaccctgatgtgcgcaatttcagcttcacggtggtggacggtaaaatctattaccgtgaaaacagccgcatgaatcccgtggatgtttctgcaactgccgaaagccgcatcaaaggcatgattgccatccgtgattgtgtccggacgctgattgagtaccagacggaggactatcccgatgccgatatcaaggcagagcaggaaaaactcaatcgcctctatgatgatttcggcaaaaaatatgggcttatcagcgcaagagccaacaattcggctttcaattccgacagctcctactgcctgcttgcctcgctggaggtgctggatgatgagggcaacttcctccgcaaggcagatatgttctccaaacgaaccatcaagcagaaggtaacggtgcagtcggttgacacggcttccgaggcctatgctctgtcccttgcagaaaaagcaagaatcgatatgccgtatatgtcgcagctcatcggcaaaaccgagcaggagctgtttgaggctttgaagggtgttattttcctcaaccccatgcacataagcgaagaggacggcaagccgaagtatctccctgccgatgaatatctctccggcaatgtccgcgagaagctcgaatgggcgcggcgcagcgcagagctctatccagaggattattccgagaatgtgcgagcgttggaggctgtccagcccgttgacctgacggcaagtgagatttccgtaaggttgggcgcaacatggctgcctccggaaatcattgaggagttcatgtttgaactgttcagcaccccacgctactgccagtggaacatccatgttcactacgcgcagtacaccggagaatggaatgtggagggaaagtcctacgaccgcagcaatgtgaaagctcacaacacctacggcaccggtagagtcaacggttataagattatggaggaaaccctgaacctccgggatgtaagaatcttcgactacatcgaggacggaaacggcaggaaaacggctgtgctcaataagaaagaaaccgccatcgcacagggcaagcaggagcttattaagcaggcctttgcagactggatatggagcgatccggaacgccgggagcagctaaccaagctgtataacgagaagttcaacagcattcgcccccgtgagtatgacggcagccacctgaatttcgtgggaatcaatccggagatcacgctgaggcctcatcaggtcaatgccattgcccatatcctctacggcggcaacaccctgcttgcgcatgtggtg

SEQ ID NO: 1702 - DNA, 8280 bp, Unknown
  gut microbiota DNA sequence
aacaggtggggtgcagttcaccttttaggtgctgtctttctttttataaagagacctgcttgctgggcaagtggttctggcttcatagggtatctcaaggaaaaagcggctcatgattaacgaatatcgggatgcacggcagagcaataacaattggttccatgtgttgatgagcgtttaaattctttttcaaaacaaaaagaggtataattagagaaaagctcaacatataatgcagcacaagtatcacagacaagggtgtgttacgatgaagcagaatgttgaggacagagccgccatgctgggggagtatatcgtagagaacaaagctactgtgcgccgtgccgcaaagcagtttggcgtgagtaaatccaccgtacataaggacgttgccgagcggctgcgcagcgtggatatggggctttacaaagaggtgagcagcgtactggcggtgaataaagcccagcgccatatccgcggcggtatggcgacaaagcgcaaatacgaggcacagaagaaatgagaaaagccctccgcaaacaaatacggagggcttaaattctatgcggctttaaatagcttggttagctttttacaggtacttcctgcggggcctttttgtggtggctttccggtagtgtatacttgcttgtgaagcggttgtaatagccggtgaagcgcgggtcgccggaggttttgatctcgtttaagtaaccgtgtgtgtccatggtggaatccttgatctgaatcaggcataccgcaatgttagagcagtgatcggaaacgcgctcgaaattgttgaggatgtctgagagcacgaagccgagttcaatggtgcacttgccttcctgtaagcggcggatatggcggtttttcagttcaactttcaatgaatcgatgacctgttcgagcggctctacttcgtaggaaagctgtaagttgttctcgacaaacgcgtctgtcgtgatgttcaaaatctcgatgatggcacctgtgaagacctcaagctcctgctgggccttttcggagaatttcagatctttatcatgaatctcgcgtgcaacgcgcaggagattcaccgcgtggtcgccgatacgctcgaaatcgccgatggtatgcagcagctgcgaaacatcgttgctgtcggacgtggagaggtttttactggaaattttgacgaggtaagaaccgagcttatcttcgtactggtcgatggtttcttcgtttttctcgattttttctgctgtggcggaatcaaaatgcgagagcagaccgatggcatccaaaatggtgtcgcgcacaaggtttgccatttttgtggtggcattgcggcactccgcaattgcgaaggacggagagagcagcagacgctcatcgagcaaaaccgcgtgcgggtcctgcttgccgggcttcaggcgcttatcacgcacggtgataacggcgagcttttcaagctgattgcagaagggcagcaaaatgaacgtggtgatgaggttgaatgcggaatgcacgactgcgatcataaacgaggagatcggctggtcggtgaatgtgaaatggaaaatgctgtttgcaatataaaagccggaaagacagatgacggtgccgagcacgttaaagtagatatgcacggcggtcacgcgctttgcgctttttgtggtgccgatggaggaaagcagcgccgtgatacatgtgccgatgttctggcccataatgaccggcagcgccatgctgaacgaaatgctgcccgtcatggcgagagactgcagaatgccgagcgaagcagcggagctctggatgagtgctgtgatgcctgcgccgactaaaatggcgacgatggggttatcgagaatcgttaagacctctttaaactgcggcaagtccgcaagcggttttaccgcgccgctcatcatggtcatgccggtcatcaaaatggcgaagccgacacatacggagccgatgtcttttttcttgctgctcttggtgaacatgatgagaatgatgccgatgagtgccacgatgggcgaaaagctctccggctttaaaagctgtacgaaaacgttgtcgctcgtgatgccggaaaggcttaagatccacgcagtgacggtggtaccgatgtttgagcccatgatgacgccgatggtttgcccaagctccatgatgccggagttgacgaggccgaccagcatgaccgtcatagcagaggaggactggatcgcaatggtgatgcccatgccgagcaaaagggccttgaagcggttcgaggtcatggaacgcaaaatacgttcgagcttgccgccgaccattttttcaaggctggaggaaagcaaatgcatgccgtagaggaagaacgcaagtccgccaaagagtgtaataacggagaaaatgtccatttgtggttgcagctcctttgtgtgcgcaaaacgctcgcttttcaaatttttttcttttttcttacttaatctttacatacaagcttattctaacataggtgacggcgggaattcaatgcttttttgataaaaaacgtcgaaagagagaattatcttgccttgacccgcggcgagcatcgcggtatactgtatttatattttaggcgcattttaggcaaacgcatttgaatacttgaaaaataaggtgggaaacgtgatgaaaacggcggcaattttggtggcggcgggcagctcttcacgtatgaaaagcggcggagcttcgaaaacgatgatggagatcggcggcgagccggttttgagccgtacactgcgcgcatttgagaatgccgcgtgcatctcaaagatcgttattgtggcgcgtgcgtgcgactttgatgcaatccaaaaagcgtcggcgttcgtcacaaagccgctcacgattaccgagggcggcaaggagcggcaggattccgtttcaaacggtgcggcgctttgcggtgacgcagagtatatcgccgtgcacgatgcggcgcgaccgtttatcacgccggaggaaatcgaaaccgtgtgcgcggacgcggaaaaatacggcgcggcgacgctggcggtgccggtgaaagacaccatcaaggttgctgcggtggacggcacggtgtgcgctacgccggagagaagcactttgcgtgccattcagacgccgcaggtattccgcctttctttgtataaagaagcgctgtgccttgcgaaaaacgccggaaagcaatatacggacgattgccagctcattgaagcggcgggcggcaaggtgtatttgaccccgggcgactacaaaaacatcaagatcacaacgccggaggatctgcttgtggcagaggcttttgcggcggaaaagtaaaggagtgttactatgcggatcggtcacggttatgacgtacacaagcttgtagaaaacagaaagctcattttgggcggcgtgcatatcccgtatgaaaagggtcttttggggcattccgatgcggacgtgctcgcgcatgccatagcggatgctttgcttggcgcagcgacgctcggggacatcggcgtgcttttcccggacgatgacccgcagtacgccggtgcggacagcttaaagctgctcgcagtggcggtggcggcggtacgccgcaagggctttgggattgaaaatatcgatgcgacgattttggcacagcgtccgaagctgcgcccgtacatcgatgagatgcgccgcaacattgcatccgcctgcaacctcgacctcgattgcgtgagcatcaaggcgacgacggaggagggcctcggctttaccggccgcggcgagggtatcgcagcgcatgcggtgtgcctgctgaaataaatttgcagtatttttgagagcttcgcttcggcggggctcttttttgcaccaattcccggcttgtctcatattctgttttgatgagactgttttgaaggcttggaggtgcttgcaatggaaaacaaaagagacacgggcgggaagcggcttattgttgtcagcagcgtgacctatgcgctgaaaagccgtgatctgctttttcaaagagggataaaagcctacattgagcggctgccgcgcacccgagaaagcggctgcggctatggtgtatatgttccgcagcgcacggacgaagcggagcgcattttgcgggatgcaggcgtgaaagtgttctaccgtgcggaacggggcgaaaaaaaatgatctatctcgataacagcgcgacgacgtacccaaagccgctttcggtgcgccgcaaaatggcgcaggcgctggagcagttcggcgcgaaccccggccgcggcgggtttaaaatgagcttgcagacggcgcagtcggtctacgatgtgcggcagaaggcggcgagctttttcggtgcggcgggcccggagtgcatctcgtttcagccgagctgcacgcagtcgctgaatatcgttatccactcgttaaagcgtggcgaccatgtgcttgtgaccgatttggagcacaatgcggttttgcggccgctgaaagccatggaggcgcacggtgtttcgtttaccgttgtgcccgtgacgcccggcgacaacgacgcgacgctcgacgcgttccgtcatgcgatgcgcgagaacacaaggttgtttgtctgcacgcaggcctcgaatgtattcggtatccgcgtgcctgtggagcggctggcggcgcttgcgcatatatacggcgcggagatctgcgtggacgcggcgcagtccggcggggtgattcccattcatgcggaacgcgacggcatcgattacctttgctgcgcaggacacaaggggttatacggtccgatgggcacgggtatgctcattacgaaaaacggcgaaaagctggaaagcctgatacagggcggcacgggtacgcgcgcgttggagctggaccagccgcgggaaatgccggagtaccttgaaagcggcacgcagaatgtgccgggcatcctcgcactcggtgcgggcatggattttgtgcgcacgaacggtgaatacatgctgcgggagagggaaatgcgccacgttcgccgcgtatacgaggcattcaaaaacatgccgcatgttgttttatacaccgcaatgccggacacgatgtactttgtgccggtgctcggctttaacgtgcgcggcatgcagagcgaagaagtgggcgaggtacttgcaaagcggaacattgccgtgcgctgtgggttccactgtgcgccgctcgtacaccgcaaaatgggaacggacggtgaaacgcccggcggcgcggtgcgcgtttcgccgggtgcgttcacgaccgacagggacattacggagctgattcgcacggtctattcgctccgggctgaaagtgcggcgcgaaaagtcgaataaaaatgaacaaagtgtaaataaaaatcgaaaaatatagaaaagaacaggaaaaaacatacaattcccccttttcatccccacctctttgtgttacactatatacagtacgcatttaggttttgtaaaaagtaaatcgtatggagcggatgtgcaccgtgtgcatataccgccgaatcctgtgcaaagaggtgaatgctttgaataaggtttttgaagccattgcttcctggtgggagtggatggtgagcattgccatgaattttcaatttaaagatgccgttgatattatcatcgttgcatttttgatctacggtgtggtcaagcttgtgcgcgaaacgcgcgcggggcagcttgtaaagggactttttctgcttgtcattctgtttattatttcttcgtattttaatctggtgatggtcagccgcgtgctggcgtatttcttccagttcgctttcgtcgcaatcctcatcgtgtttcagccggaaatccgcaaggcgctcgagcaagtgggccgcaacaacgtcggacaatctattgcggctgtggtaacaggccgtgaccgcagctatgaccgcgcgcagatccgcaaggcaatcaacgccgtggtagacggcgtgggtattttacagcagctcaaaatgggcgcgcttatcgtattcgagcgtaaaacgaagcttggcgacatcattgagaccggcacgcagattaactgcgagccttccggccagattgtgggcaatatttttttcaataaggcgcctttgcatgacggcgccatgattattcgcgacggcatgattcatgcggcgggctgtattctgccgctgacgaaaaacacttcggtctctgcagagctcggcacgcgacaccgcgcggcgctcggtgtcagtgaggaatcggatgccgtggtcgtggtggtttcggaagaaacggggcagatctccgtggctgtaaacggcgttttggcgcgccgctttacgcgcgatacgctgcgtgatgttttggaggggtacctcattccgcaggaagaagcttccaccgtgcgccgtaagttcggcgtgctgaaaagcaaaaggacggtgaagaagtgatggcaaaaatgtctaagaaacccagaaacgaagtgaaacagcgcttacgcgtgtttgaaaacaacacaattttgcttatcttttcattccttgccgcggcggccgtctggtttgccatgatggcgagcagctccgaaagccgtgcgaccgtaatccgcaatgtgccgattaacgttgaaatttccgatacggcgcaggaagccggtgtgcgcgtgttcagtatgagcagcagcgcgacggatgtgagtattacgggcaactcactcatcacaagtaaggtgacgagtgaggacatcggcgttacggcgacgctggatccttccgtcagcatgctgacgggcagcagcttgcaacagacgacgctttctctgcgcgcagcaaaaaagggcaacaccctcgccgaatacgaggtggaaagcgtttcgccgtccgagatcacagtggtgtatgataaatataaagaaacgcagctcactttggaaacaaattttcagtacactacggcggaaaattactatgcgccttctacgcccacactttctacggagcttatcacggtttccggcccggaaagcagcgtgaataaggtggcgcgtgccgtgttggaatataagttcagcgaagagctcacgcagtcgaagtcgctttcctgcaaagtgacgttgtacgacgcgaacggcaatgtacttgacccaacggagctctatttgaagctgagcgacgacacggtggaggtctccattccggtgacgagccgacagacggtcaagctggaagcggacgtgcgcaatattccggacagctttgcctcgaaccgcatcacgatcgacccggcagaaattgaaattgccggcgacggtgaaacggtctcaaagtacacgaccctgacgctctccacgccgatcaacttcctggacgttacgccggaaaacaacacgttcacggtggctatcccggtgccgagcggtgtgacaaatgtgacgcgagtggaaaacgcgaccgttacattcaacctgaacggttacaaggaaacgtctgtgctgacgagcaacatcagcgtcatcaacgtgccggagggtatggaagcagagctttctacaaagacgctcacgctgaagattatcggcacggcggcgcagatttcgaagctgacgggagattccgttttctgtacggtggatctttccacggtgacagacccgagcggcagcatggaagcgccggtgacggtgacgattaacaatgcggattcctgctgggcgaccggcagctacacggcgcatgtgacgctttcgccgaaaaccgaatcttccaccagtgatgcttcgaactaaataagcaaaatgaaaacccgccgagctgaaaagtttcggcgggtttgtgttttatgggaagagtacattcagcgtagcgcgatcatgtcgccggtgaagtgcgaaagccagtcttttacagcgaacggtacgccggtggcttttaaaataacgatcaccaaaatgatggcgatgagaataagcagcaccttaagcgcaaattgcgggttgccgtgttggtgctcgtcttcgtgctccggcacatggtgttctttagcggtctgcttggcggtttcgggtttccgtgttttttcttccataacggcacctcttttctgcaaagatacagaatctttcatttccattttaccacatgcctttcctgttttctataatttatcgacttttttcttcgggaaaaatcaacaaaaattcgggaaataattttgcgccgagcgcgtataaaacaagacactttggtgtcttgttcagaaaatccatacagccgggcttcctaaaactttcttgaagaaagtttaa

SEQ ID NO: 1703 - DNA, 18255 bp, Unknown
  gut microbiota DNA sequence
tgttaattcacttgctgactttggtaactactataaatcaattattgaacagaattaaggacgttagtatttgaaaagctcgaacaattcaagtttgtccacttgccctttgagagaggaacaatccctttctcaaagggctttttctatttatacggatattcgcaaactacaagataaaaccaaaacttcatggatggctaccatttgcacgtcgggaattgctgctatcctatatgcgagtttgctgaaaaatgcaaatttataaaggtaaaacagtgtgaaaagattctgcggctttggctgcgggagcttttcgtttccgggtttgtcacggacagggcgggaaagcgggttcaaacgcggcataccttttcgttataatagaaccaaagaataattctgttgagcaaaagggggacgcgtatgaaaaatgggaaacgggcggtaagctttattttggcggtggtgctgttgtgcacatcgcttgcaggatgcggcatggtgcagcaggacaaggcgtatttggagcaggtggcggcggccgtgacggagacgcagagcattttaaaggacgtggaagctgcggcggacgagctttccgggcagagcagcattgtgtatgagaattctgtgaatgcagagggctttgacgtgctggacgagtattatactttgtgcacggagaaactaaacgcgcttaacgacgcggtgggcgcggtgcggcagcagatgcagagcctcgagcgctgcgacgcgccgaagaccgaaaaaggcaaggctgtggaagcggagcagaaggcttactttgaggacgcacttgaggtgatcggcggcattcaggaggcgctgacattttacacggcgcagtatgacgctttgcagccgcttgtaacggctacggtcggcgaccgcagcgacgagcaggcgtacctcatttccgtttatgaggcggcgggcaatgtgaaaacggcgctcagtacgttggacacgccggagtggctcaatgacctgtggccgaaatacgttgcgaaccttgatgtgatgacgaaatacatggaatcgcgctcgtggggccttgcatggtcggacgttttgagactgtattccgcaaaccagcttatctcgcgcgtgggcattacttccgggcggcacgaggagacgatgttcgatttatacagccgcgaatataaccacgccgcgtttttgctcgatgagaacctcgacgcgtatgcggatgagattctggcggcctgcgagggcggcaaggatgttggcgcgtatgacgcgcaggcgccgatcgtgttttcggactactcgaccgtggaggagatttttccgaatttgtacccctcgatggactcggcgatcaacctgcttttatatacggacaagggctacaccgacgtgatggtgacggcggaaattgcgggctttacgcagaaatatgagcagaaagtgacactgacgccggagatgacgtatttgatgatcaagccgccggtgctcaccgatatgcccgacctttcaacgacgaaggacacgcagatgacgctgcgtgtggaaaacacgatcacgggcgaggcgattattcaggagacgaagaacattgagctgcacagcgtatatgattataaaaattacagcgatgaattcggcatcatccagaacgacaacatcttggcgtggatgacgccggaaacggacggcattttgcaggtgcgccgtaacgcggtatcgtggctggagcaaagcttcggcacggaatacggtatgctgccggggtatcagccggcgtacggctttacgtccgaccaaggcgcgtacatcacgtattatcaggtggcggcgatacagagcgccatcagcagcatgggcgtacgctacaacatggggccgtattcgttcagtgcgagccagcgcgttttgatgcccgacgcagttttagagaacggctccggaatttgcatcgaaacggcggttttaatggcgagcgtgctggaatccgcaagcatgcacgcgatgattgtgctcacgccgggacacgcgcagacagcggtggaaacgtggagcggctccgggcaatacttccttattgagacgacgatgctgccgtttacggcgacgcaggacgcgctgcagtcgctcattcagccactgagcgcagaggaatgggcgaactacttgtacaacaaggagcaggaggcgcagcaatccggcggcatggtgtatgtggtggattgcgatttggcgccggtgctgaacattcagggattaaactactgaggagacaaacatgacacgaacgaaacgaatgacggcggctgtgctgacgcttgtattgcttttgaattttgcgggctgcggcgcgaaaaacgcgctgtttgaccgagtgagcggcgcgggaaaatttgcggcggaaagcctgacgatttacgaagaaaaaggaagctttgcggcggaaccgaaaacggtgcgagacgcaaagcaagcggaagaaatttttgacgcgttgaaagatgtgacgctcggcgaagttgtaaagacgaatgacaaatacacgcggtatatttttacatttgcggatgcaagcgacaacaaaatgagttttacgctgcgtgaggacgggtgtgttgtattaggcggcaagacatatgatgcgctcggcacggacacggtgtttgaggcggcggggatagacccgggcgaggagacggcggaatcaaaaacggaagcgttctccgaagcttcaaatgcgcagacggagcctgaagtgacgcccgagcctgaagtgaccgtgaccccggagccgacggcggaaccgacacctgaagcgacgtacacgttggttgattacgacggcggggtgttcacgatgcagctgccgcaggggtggcagattataaccggcggcgaatacgcgggctattccatccgcgcgtgggacccgaatgacccggatgtgcagatcttctattacggtgagcttggcccgtactttaagagtgcggaagcgaaggcgcagtatcaatcgatgagcacgagcaatgacccgctgacatatttgccggtgctggaggacccgacgcttgcggggtgcttaaacgcgatggacgattaccaagacgcttacgacggcatcatgccccagggttttgcatttgcaaaaattcaaaacatgacagttttgagcgaaacgcccattacgacgccgcttgcaagttacgcggtttcggaagcttcgatcttagcgagccttacatcggaaacaggggcggcctgcacgggtatgtttgagggcagcattttagacgcgagcggctatgaaatcaacggtgtggacgtgacgccttcgcgcggtgcctcgaacattttcggcatcattgcgccggagggaaaatttgagacggtggcgccgatcttgatacagtctttgacgagctttacatttacggacgagtacattcaggaagcgatacggcagggaaacatgcaggcggaaaacgcggccgaggtttcgcgccggaatagcgaaatgatggagcgtgttgtgaatgatttttgcgaatatattcggcaataaacggcgattagcgccgcgaacgctgcaaaacttttaaccacgttgacgcgggtggcggttaatcctcaacgtaaggcaagatcatgttttggaaggcgctgagcattttactgtggcgaatgacgaaatggatggcgggggctttgcttttggacagcatgacccactcgttttcgtggatttgaatttggatattgcggaacgcgggtttctccacaaaacggacggtgtagtttgggtgctgttcagcgaatattttggtggctttaaggtgcgctgtgtattcttcataggtgtacgtgacggtggtttcgatgaatgcgtttgaaagcgagagcgtgagggggcttgcccggaacgcttcttcgcttacatgcgggagctcgtcgatgacggtgtttgcagtgagaatttgctcgatattttccgtttgctgtttgagtgtggcgttgatgctttctgcgtctgctgccgacatgccgctgcgctttagaatgcgtccgagcagatcttccggcatggtataaagcggcggagcggagagaatgttttgccgtgcgccgacggtggctgcgtcgtttttgaggaatgcgcggaacaaatcggcctgtggggctttataaatttccattaagggctgcgctttttgcagcagatggtctgcgatgcggcggctgtgctgcacctcttcacggttattcgtgaaatggtaatggccgtcttcgtgaaagccgtttatgcactcgccggtgagcgcggcggccccagagacgtaatgaaagtggcagtagacggtgttctgcacgccttttaagtagtacggcgagacctgtcccgtcatgtaaatggggatccagctctctaacccgagcatcatttcttcaaacgggcggtctatgttgtggattatatcgagatgcagtccttttcggagcgcgacggcgatgccgaacatccattttttaccgaagtcgagatcttccgccatatcggccatgggcatatcgctgcacatgaaaacgggggcggcggatttggaaagcgcggtcgccttgaaaaaatcgagctcgccctgcttcatttcctctatgccgtagtaattgcgcgaggcagggaatcggaacgggagcgaaggcaccttaatctccccaaaatgaatggcttcgatatattcattgaggtcgaaggtatcgagatgcgcgagaaatttggagacggactcggcatcgcgctgctttgcggtgcacagccactccatgaggagcgcagtgtattgctcgggctttgtaggttgctctgcgggtgtaccgacgagcgcgcagagggcttctttttggtcgtttttcaggcaccgccttgtgacatagcggcagacctgcgtgatgaattcctctgtgtttgcgggttttctctgtccggagcagacgcgggagaggtaggatgcgtcgaaattcatggcgcgggaaagctctgcgtagctgatgccgaatgcggtgagcaggtttttgaggttttgaacggcgctgtcaaaatcggatttttcggtgtgcagggaagcgcggagggcgcagagaacttcgccctccgaaaagccgggagaataatcgctttcggcggcgatggcgcagatgccctgtgcgagccgcagaagctgttcgctgtccctgccgggttcgcgctcgccggagcggtagcggctgatggcggcatccgatatgccggaggcggcggaaagcgttttggcggagcagccgagtgtttcgatatataaattgagacggtcacaaaatttcatgcgggttccctccgtatgcttgatttaaggcgattataccacgcttcgaccgaaaccgccataagcaaacgcagtgggttttgacattttccggcgtgtcaatgacaaaaccgggaaaacgcttttttcggttacggtcgtttggtaggatagaggatagaaaagggggcgggaaaatgaagcgatacggttttattttgctgtgtgcgctggtcgttttgtgcgtgctgcttgcgggctgcggaggaaagacggcggaaagaagcgaagccggcgaggtgtttatgttttgcggcagcgaagcagaaaatttcgcaaagacatttgacgtgaatgagatgaactgcatggaatatcgctacacgatggacacgcccgtttcctgccgcatcacggacaaggcggcgatgcaaacgatttttggcgcactttgcgaggtgaaaatcggcgaaagaacagacatgcgtgcaacggacagcgagcagagtttgacgtttgtgaaaacagacggcacgacgtgtgtgatacggtttgagcagcggaacctgctgtatgaagaagacgcttaccaactggaaaatgatgcggcgctttggaaggcgctgcgcgaagcgaaatagaaatgggggaacgacatgaaagaatcgagagtatttgaactgaaccaagtgaccgcagagcaggttttggaggctgtgacgacgtttttgcgcggcgaaaagggcatggaggtgcagagcgtggcgacgccgaacgggtacctcattcaggcggcgcaggccgatacgctgcgcacgctttccggcatgaagctggcgacgacggtggagctcacggtaaacggcatgcagctcaatgtgacgctcggcgagggccagtgggcggacaagctgggcgcgggcgccgtggggctttttctgctgtggccgctggcggtaacggcgggcatcggtgcgtataagcagaaaaagctgccgagcgagatttttgaggtggtgtaccgctgcacgatgggcgagccaacgagcttccgggcggcgggcgtacccgtaaatgcggcgccgacggtttcggcgggggcagtctgtccgcagtgcggggcgcagatctttgcaaacgcgaagttttgcagcgcttgcggcgcaaagctacaaacggtgtgtccgggctgcggcgcgccggtgaagccgggcagtaaattctgctcgaaatgcgggcaggcgttttcttgatttatatatcccaaaacggcggcgtggagcttaggctttgcgccgccgttttttatgcgcatgttttgcaccgtgtggagtgaagcggttgaaatcttcggcgaattcttgtatgataagggaaaagaaaggcggggatgaagatgaatattacggtttatctcggtgcgaacgcgggcaatgaccccaagctgcaagaagcggtggaggcgctcggcaagtggattggcaaaaacgggaatgacctcatttacggcggctcaaaatgcgggctaatggggtcgatcgccgaaagcgtgctgcaaaacggcggcaaagtgaccggcgtggagccgcagttttttgtggactccgagctgcagcacgacgggctgacggagcttattgtgacaaaggacatgacggacagaaagacgaaaatgattgagctcggcgacgcatttatcgcgttcccgggcggcacgggcacgctggaggaaattgcggaagtgatgtcgaaggtatcgctgaagcatttagacgcgccgtgcattctttataatctcaacggatattacgacgggctaaaggtgcttttaggccatatgatcgagatggggctttcgaccaaggagcggcaagagggcatttattttgccgacacattagatgagatcgaacgcattttagcggaaaagtgaggaatatacatgccgaatattgcatggaacgcgaaggagtatcagcagaatttttcgtttgtgccgtcttacggcgaagcggtgacagcgcttatcacgaagccgcagtgagcgaaaaagcgacacctgacggtttccgggcttgtgcggtgggggttcgtccgctataataaaagcagaacgagcgcaaaggagtgctgctttatggcaaagacgaataagacaccgaaggcggaggacaacgccgagctgcggacaatctcacttttgaaaattctgaacacatacagtgacgaaaaccacgagctttctacaaaaaacattatggataagctccaaaaggaatgcggcgttatggtgcaccgcacgaccgtcggcaagaacatcaagcagcttgcggactgcggctttgatatttacacgcacaagacgacgcagaaccgctattaccttgcgagccgcttatttgagatgccggaattgaagctgcttgcggacgcggtggaatctgcgggattcatcaccgaaaagaaaagcgaggagctgattgaaaaactttgccggctgacgagcgtttatgaggccgaggctttgcaggagggattttgcgcgaacaacgggaaatcctgcaacgagagcatttactatattgcagacacgatcaacgcggctattgcgaagcggaagaaaattgcgttttactattttcattacggtccgggcaagaaccgtgtgctgaaaaacgatgggaagccgtatgttttcagcccatataagcttgtttggaatacagatgaatattacgttgtggggtattccgacaagcacgaaaagcttgtgagcttccgcgtggatcgcattgaccgttgcccggagattttagatgaggacgcggagccgcggcccgaaaaagaggagttgatgcggcatatccgcacgatgacaagcatgtatgacagccgccgtgagcgcgtgacgcttttgtgtgacaacgcgatgatgaatgcggtggtggacgcattcggcgaggatgtgaaaacaaaggcctttggcgacgatgcgtttaccgtggaaacggagacggcggcaagccctgtcttttaccgctgggtgttcggctacggtgggaaaatccgaatcacggagccggaaaacgtgaaaaaggagtatgccgaaatggtgaaaagcgcggcagaggggcttttgcttttgtaatcgtctgaaatttttacgctatggcttgcgtttggcgctctgttttggcgaaacgtgaatgaaaaacacgccggcttcatgtatccgcaagtaaaatcaagcagagtgcgcttttctgcggtatactgaacgggaagcagaaaggaagcggtgagcatgtgtgtatggtacaaaagcattcaagcgcttgtggaggagattgaccggtgcggcgcgtaaagtaaacagcagtccgacctttggcagtttgatgcacaaaggtcgggcctttttttgtgttgaagacagaacgtgaatgtgctataatgaaccgtaagattttgggaaagggtccggcaatgtataactccaaacgattcgaaacggtgaaaaatatgagggaaaacaagaaaatatcgaatgccgtgcaggcggccatcggcgtgctggccgtggttttggcggcgctgatcgtttggatgatggtgctggtctcgggcattcagggcacggcgcgcgtggtgaactatgcgggtcttgtgcgcggtaaaacgcaacgccttgtcaaaatggagattgcggggcaagcggaggacgaaatgataacgagcgtggaatcgtttatcaacggtctgcgcttcggcgatgacgagcttacccttgtgcgattggacgacaagagttttcagacgaaaatggaagagctggcttcttgctttgaaagcctgaagcaggagatttatcttgtgcgcgaaaagggttttgagaaaaccgacatcatcgacaaaagcgaaaagtttttcgacatttgcgatgaggcgacgggccttgcggaaacctattcgcaaaagcgcgcgtcctctttggcggttttggagcggtacatcacggcggacatcgtagttttgatggcgctgatcggttatgagtttatcaaggcgctgcactacgccgccatgaaccgcgctttgcagaaaaaggtgtacatggacgaagcgacggggctgccgaacaaaaataagtgtgaggagctattgagcgcgccggagatgatcacgatgcccgtgggtgtttgcagctttgacctcaacaatttgagacgcatcaacaacagcatgggccacgaaaagggcgacgcgtacattcgcatttttgcggagctggtgcgcgaggcggtgccggcgcattactttgtgggtcgcgcgggcggcgacgaattcatcgccattatggacggcgcggacaaggaagaaatgcagcggtgcttacagctcatccgcgaccgtgtggacacgtacaacgcggcgaaccccgattttccggtgagctacgcggttggcatttcggtctccgacgagaacgaaagctgcacgatgcgcgatttgtatatcctcgcagacaaaaacatgtatatcaacaaaaaccacgtgaagcgcgaggaagcattggccgaaaagaagctggatcgcaggctgctgaaaagcatgaaaaaatacggcagcaacttttccgattgcctgtactgcgacgcaaggcaggacgcttaccgggtgattcgtgcaagcgaggcgtttttccttgcggcggacggcagttattccggcgcggtggagcagattgcagaagaacgcgtggcacaggaagaccgcaaggcggtgcgcagcaaattgcagctgccggcgctgtgcgaggcgctttccgaaaagaaccgcgtggtggaattgcagcacaagattttcggcgcgaacagtgccgactatgggcgactgacggcgatttttgtggatgcagacccggacggcacgctgcaccattttttactggcgtttgagacgatcgacagtgtgcagccggagacggacgccaagcagcaactgacgcagtattacgagcagctgaagcagtctattttggaaaacgacagttacgtggatgcgatgctggagactgcggatgcggtatactccgtgaatctgacggatgatctggtggagcgcgatttccgtcgtgaacgcggcgcagacacctttattgaggacttgaaagcaccgtgtccgtacggcgaatattgccaccgtcattctatgctgattttgcccgaaacgatgggcagctaccggttaatcgacacggccgaaaagcttttggagcgctatgcgagcggagaaaagcaggtgacggtggaatactgtgagcgcgtatccagcggcgagacacgctggatacagaaaacggcgctgatgatgtcttcacgcgtatacgatgcgaagagcggtgaggaaaagccgatgatccacagccttgtgctgctgaaaaacaccacggagttccatgcacaggagcagaaggagcacgagcgcttgcgggctgaggtggacgaagcaacgctggcgaataaagcgaagacggatttcctttcccgcatgagccacgatatccgcacgccgattaacggtgtgatgggtatgctggagattatcaagaaaaaccgtgaagatcatgagcgcgtggacgactgccttgaaaagatccatgtttcctccgagcacctgctgtcgctcatcaacgatgttttgaatatgagcaagctggaatccggccatatggagccggaacacgtgccgtttgaccttgacgatgtaatgaaggacgtccgcgcgctgaacgaggcgcaggtggcgaaaacgagtattgtgtatacctgtaacaagacttcgtttacgcacgtaaagcttatcggcagcccgctgcatctgcggcagattttattgaatctgttcagcaacgcggcaaaatacaataaagaaaacggcacgatcaaaacgtatgcggaggagattgcctgtgacgaaaacacggcgacattctgctttacgatacgtgatacgggcatcggtatgagcgaaaattttgtgaacaacgagctttttgagccgtttacacaggaaaagcagggcgcccgcacgcaatatgagggcacgggcctcggtatgtctattgtgaaagaactcatcgagaagatgaacggcaccatcacggtggaaagcgtactcggcgaaggctctgcgtttacggtgacgctgccgtttgagatcgacaagcatccctttgcgcaggcggcggcgaatggcgcggcggacgaaacggctctgcacgggctgaaagtgctgttggccgaagacaacgaactcaacatggagattgcggaattcttcctggaagacatgggtgccgaaacgatgcaggcgtggaacggcaaagaggccgtggaggccttccgaaactccgcgccgggcgagatcggcgtgatcttaatggacatcatgatgccggtgatggacggccttgaggcggtgcagcgcattcgtgcgctgcaccggccggatgcgaaaacggtgccgatcatcgcgatgacagcgaacgcgttttcggaagatgtggagcgcagccgcaaagccggtatgacggagcatctctcgaagccgctgaatgccgaaacgctgaaaaaagcgatcttacggaacatataacccgtgcggtaaagacaaatattcgttaagggcggcgaagagctgcccttttttcgtgtaccgacacttgatttttctttttgttgtggtatactcatttgggagtattagaatcaattctaaaacagggaaaagaggggtataaatggcaaaccgcaacgaaaaggaggcctcgcgcaagcgaattctttctacctgtgtgcgtctgtttttggagcagggatttaagcatacaccgccgaagcagattttgacggaagcggatgtttccgcgggcacgttctataatttgtaccgcacgaaagccggtgtgcttaccgagctgaccgagttcatgtttcaaaatcagtttactatcgcggggcagattgtgcagggggagacagaccccgtaaagctctacgcggtggagacggcgattcagctgacgctggcagagttgaacgagaacctgcgccaaatttacgtggaggcgtacacgctgccggaaaatttggaaatcatccacaggatgacggccgagatgctgcaccgtattttcggcgcgtatatgcccgggtacagtgtgagcgatttttatgagtcggatatcggttcggcggcgattatgcgcggatatatggcgcgtccgtgcgacgtgtattttacgctggaacgcaagttagagcgctttttgcagctgacactgcgcatttattgcgtgccggaggaaaaacagcgggaggttatggcactgattgcgagcctcgacatccgtgccattgcaaacgaagtgatgcaaaagctgtttgccgcgcttgagatgcactatgaattcacgctcggcgaagaggcaaagcaaatttgattaaaaaagagccgcacagacgggtatgcacccggttttctgggcacaggttcaaaattgaaaaatgggtttccatcatggatgcttccctgaattcagaggaaagcgcaaatatttgttgagtgtgctgtcgaaattcattgaaaacagcaaaattctgtgctaaacttagagcataaacaccgggcggaatataacgtgcggaaaccattgaaaaggagcaattatttatgggtcttattaaggcagctgtcggcgccgcgggcggcgttatggcggatcagtggaaagaatttttctattgcgaatcgatgccgaaagaggtgcttgtcacaaagggtgtaaagcgcacgagcgggcgttcctccaatacgcgcggcagtgacaacatcatcacgagcggctccggcattgcggtggcagacggccagtgcatgatgatcgtggagcagggcagagtggtggagctttgcgcggagccgggcgaattcacctatgacgcttcgagcgagccttctgttttctccggctctctcagcgcgagcattaaaaacacatttgcgcagatcggcaagcgttttacgtatggcggcgacgctggcaaagatcagcgcgtatattattttaatacaaaggaactcatcgacaataaattcggcacgccgaaccccattccgttccgtgtggtcgataacaagatcgggctggacgtggacgtttccgtccgctgctccggcgtatactcttaccgcattgcggatccgcttttgttctacacgaacgtgtgcggcaatgtggaacaggagtatacccgcgatgaattggacagccagctgaagcacgagttcatcagcgctttgcagccggcgttcggcaagctttccgacctcggtttgcgtccgaaccagattgtggcacacaacacggagctggaagacgccatgaatacggcgctttccgcgaaatggggcgagctgcgcggcttgacggtcgtcagcattgcgctcggctccgtgacactgccggacgaggacgccgagatgatcaagcaggcacagcgcacggcgatgatgcgcgacccgactatggcggcggccacgctcgtcggcgcacaggcggacgcgatgaaaacggctgcgggcaactctgccggtgctatgaacggctttatgggcgtaaatatggctatgaatgcgggcggcatgaacgcacaggcgctatacggcatgggtcagcaacaggcggcgcaggctgcggacagctggaagtgcgcgtgcggcacggtggtcaacggcaatttctgcccgaactgcggggcaaagaagccggataacgacggctggacctgctcctgcggcaaagtgaacaaaggcaatttctgtgcaaactgcggcgcgaaaaagccggagggcttaccgaagtaccgctgtgacaagtgcggctgggagccggaggaccccgcgcacccgccgaagttctgcccgcagtgcggcgacccgtttgatgaaaatgaccgtgcctaaaggttgcgacctgcgttgaactgtgaggagatgagagcaaatggcggcaattaaagaatacaaatgtccttgctgcggcggcgctgtggaatttgacagtaaaattcagaagataaagtgcccgtactgcgacacagagtttgacaccgaagcgtttaccgcgcacgaggaagaagtacaaaacgcaaagcccgacgaaatggactgggagaccacggccggcggcgcgtgggagcagggcgaagaaagcacgctgcgcagttacgtgtgcaactcctgcggcggagagatcgtctgtgatgaaaacacggcggcgacctcctgcccgtactgcggcaacccggtcgtgatgatggggcaggtgagcggcgctttgaagcccgattacgtgattccgttcaagatcgacaaaaaggcggcaaaggaagccttgcagcggcattataagggcaaaaagctgctgccgaagattttcaaaaaagagaatcatatcgatgagattaagggcgtttacgtgccgttttggttgtttgatgccgatgccgatgcggatattcgctataaagcgacgcgtgtgcgcacctggagcgacagcgattacgattacacggagacaagctactactcgataggccgcagcggtgatattggctttgaccgcgtgccggtggacggttcctccaagatgccggacgatttgatggaatccattgagccgttcaagtttgaggacgcggtggattttaaaacggcgtatctcgcgggctatcttgcggataagtacgacgtgacggccgagcagagcatcgaccgtgccaatgcgcgcatcaagcgctctacggaagacgcattcgcttccacggtgaagggatatcactccgtcacgacggagaattcctccattcgtctgcacaacggcaaggcaaagtacgcgctttaccccgtgtggcttttgaacacgacgtggaagggcaaaaagtacctctttgcgatgaacgggcagaccggcaaattcgtcggcgacctgccggtggataacgggctgtattttaagtggcttggcgggcttacggcaggcttcggcgtgattgcgctgattgcctatttcctgttctggctgttctaagggggtgcggagaatgaataaaaagcttttatcggtatttttcgccgttcttttatgtgtcgttgtgtctgttccggcgtttgccgatacggcggaggactacacgccgcacctgatcgacaacgcggaccttttgacgggcgaggaagaaagtaatctgctcgcgaagcttgatgagatcagcgaccggctgagcgtggacgttgccgttgtgacggaagactccatcggcgacaagacaccgcgtgaatatgcggacgatttttacgattataattcgtataagtataacccggacggcgttctgctgctcatcagcatggaagagcgcgactggtacataacgacgacgggcagcgccattacggccattacggatgcgcggcgcggcaatatggaggatgcgtttttgagcgacctcagcggcggctattattacgacgcgttttcaacgtatgccgatatgtgcgataaatacatctcgggcgtgcagagcggttactacgaggaaggtgaggcgtacgaggagagcaccgtggggaatttcccgtggggcccggcgattttggtttcgcttgctatcggcctcgtcgcggcgcttgtcgtgacgggttttatgcgcgggcagctcaaaaccgtgcgccgtaaggcggcagcgtcggattatgtgcgccccggcagcatgaacgtggcgtatgcaaacgacgtgttcctctactcgcacgtgaaccgcacggcaaagccgaaggacaacgattcttccggtggctccgcaacgcacacgtcgtcctccggcacgacccacggcggtggcggcggaaagttctgattttgccggcaaggcgatgattccgtttgcggcctgcggcggcagcggtatgggctaatgcgttttaaatcatagctaaaccgtataaattcatagaaattaaatccgcatttccgtaaaaaccgggaatgcggatttttaattcttgttgtgaataataacgtaaaatttaagaaagaagaaaggaaaataggttgatttttaactgaacttcatatatgattaaaatagaaacagtatatacggtacgttctgaaaattaaaaatggaggaactgttatgaagaaaaaactatttgcaatcctactcagcattgtaatggtagctggactcctgcctgccacagcaatggcagcggaacccacagtctacgacatctgggtagacggcgtacaggtcacgtctgaaaataaggataatctttgcggtggaacagtaagctatgacccggccacgcacaccttgtccttgaacaatgccacccttgacaacgacaccatgtcagactacggtattaaaacgactatccccagtacgttgaagatacggttgaccgggacaaatagcattacccgaaccgattccggcggaggagtgggaatatatctcaattacagcaattctgtcgagattaccggcgatggaacactggagatcaacgttatcgggaaaaactacgatggaattagcacaggggctgacgtcaagatttccgataaagcaagggtcataattaactctgaaggcggattgggcatagccggaagaatggtcgaaattgacggggcaacagtgaattccaccggcttgtatgccggaatcgatgcccattggctgaagattataaatggcgctgatgttacgcttaaggcaacccaggacggacgcaacggagcatatatctggaaagatcaagaagggaacggcggcgatattgaacttgctgcatctaaaattaaagcaacaagctattatcccggtctgtatgctgcaggcaatctgacggttaacggcggcgaggtaaactgtacctctactgcggacggcgcaatatggacaaaaggcgatattctgatcaagggcggcgccaaagtaaccactgacggtaaatcccccatgggcggtaacggtacttttaccgtagaagaagcagagattgacgcaaagaatacgaatgagaacaatacccctgcaatttccgataaatgtgtgcctgtgattgccgatggctatcacctgaactatgcaaaagctgtagactcggaaggaacagaaattgacctgctttccagcggtactcaggactttgcaaaatataaaaatgttcattttatcacaaaggctgtctatccggtttctttcgttgtaacgccggacggtctgaccaatgttgttgttaaagtaaatggtcaggaggttaccggctctgtcagtttggaagcaggaacttaccctgttgaagtaacagccgataactgcaaagcgtatagcgacaatataacgattacgtctgatacggcaacgcacacgcagacgattgcaatgacttatttacctgccgactacaccaaagtagacgcagccattgcgaaagcaaatgcgctgaataaagacatgtatacagacttcaccgcagtggaaacggcgattaacgcagttgagcgtgacaagaacataacggaacaagacgaagtagacgcaatggcgaaggccattgaagatgctatggccgcgttggtggaaaagcccgcagcgaccgcgacgcctacggcaacacccacggctgtgccttctgcaagcccgacggcagttccgactgcgacaccgacggcaacacccacggctgcaccttctgcaagcccgacggcggctccgaccgcgacgcctacggcaacacccacggctgcgccttctgc

SEQ ID NO: 1704 - DNA, 27353 bp, Unknown
  gut microbiota DNA sequence
gttcagcggcattttcttcgtcatcaccgtgtgtatggcggttattgtcggcgcacagattataccgaattcgagcggcagtgttctggagccttaccacgaaatgatgtctagcgcctccgaagacgggcggtacagcgtcgttttttacggggaaaagaaaaatattttctcaggcacagatgctgacgtgtatcttgtaagccttgaatccgacccacccgaaagatggcttgtgtgccaatttaaaagcgaaagccggtttcagctcgcatgggaggataacgaccacttctgggtcaaccgaaatccgtattcggtggaagaaattatagcggcgccgagtgaggagacaaataatacacagtgaaaagccgaacatcacaggacgtcggcggacataaatggcgggacgcattgacaaacgggtgttcgtgtgttatactaagtcgtagcgaaacgtatgttctaaaaattcagtaagggagcaaagccatgcaggagcgggataaatttgtactgaagtcaaaatatcagccgacgggcgaccagccgaaggcgatcaaagagcttgtggagtccatccgcgcggggcataaggagcagacgctgctcggcgttacgggcagcggcaaaacgtttaccatggcgaacgtcattgcggaattgaatcgtcccacgcttgttttggcacacaacaaaacgcttgccgcgcagctttgcagcgagttccgcgagtttttcccggataacgccgtggaatacttcgtttcctactacgattattaccagccggaagcgtacattgcgcagacggatacctatattgaaaaagacagcgccatcaacgaggagatcgataagctgcgccacagcgccaccagtgcgctttctgagcggcgggacgtcattatcgttgcgtccgtttcgtgcatttacagcttaggcgacccaatcgattaccgcacgatggtcatttcactgcgccccggcatggaaaaaagccgcgatgagcttttgcagaagctcgtcgagatccagtacgagcgcaacgacatcaactttacgcgcaataagttccgcgtgcgcggcgatgtagtggaaattttcccggcggaatcgagcgaaaaggcgatccgcgtcgaatttttcggcgatgagatcgaacgcatcagcgaggttgtgccgctcacgggcgagattatcagcgatttaaagcatgtcgccatctacccggcgtcgcattacatcgtcccacgtgaaaaaatggcggtcgcgctcaaggagatcgaggccgaaatggaagaacgcgtcaagttctttaagtccgaagataagctcatcgaagcgcagcgcatcgagcagcgcacgcgctatgatattgaaatgctcagcgagatcggcatgtgcaagggcatcgaaaactattcgcgcgtgctttcgggccgtaagcccggcagccagccgtgcacactgctcgattatttcccggatgattttctgctgtttgtcgatgaatcgcacgtgacgttgccgcaggtgcgctccatgtacgccggagaccgcgcgcgcaagcagagccttgtggattacggcttccgtttgccctcggcgtatgacaaccgcccgttgaattttgacgagttctatgcgcacgtcaatcaagcggtgttcgtcagcgccacgccgggcgacttggagctggaaaaatccgcggcggtcgtggagcaggttattcgcccgacgggacttttagacccgcgcatcacggtaaagccgaccgacgggcagattgacgatcttatttcggagatcaacgtgcgtaccgcgcgcggcgagcgtattctcgtgacaacgctcacgaaaaaaatggcggaggatctcacgggcttccttgaaaattacagcatccgcgtgcgctacatgcaccacgacatcgatacggtggagcgcatggaaatcatccgtgacctgcgtctcggcgagtttgacgtgcttgtcggcatcaacctgttgagagagggccttgatatcccggaggtgtcgctcgtcgcaattttggacgcagataaagagggcttcctgcgcagcggacgcagcctcatccagaccattggccgtgctgcgagaaatgcacatggcgaggtcattatgtatgccgattttgtcacgccgtcgatggaatacgcgatacgcgagacggagcgccgccgcgccattcaggaaaaatacaacgaagaacacggcatcgtgccgcagaccatcgtgaaaaaggtctccgagattttggagatttccacaaaggcggaagaagcgggcggtaaatcgaagaaaaagaagaagtatacggccgccgaaaagcgcgtgatgattgacaagctcacaaaggagatgaaggcggcagcaaagctgcttgagttcgagcacgcggcctacctgcgtgaccgcatcaaggagctggaaaaatagggggttcgacatgatcgacaaggtaaaatgctttacggaggcaatgcgtcaactggcactggaatataatgcgaagccagaagactttacagcaaataaagtgactgtcacaacgccggcgaagcccgatggcgtgcggctctattcgcatgagctgccgttcttccaaatggcatcaaccggcagtggcgtggttatcacggcgaacgaggttttgcatccgtttttaaaggagtttacgggcgataccgagcgcttcaagcacccgtattggttgttcgagcttccgcatttgctgtgcatcgaacgcgagctgaacaaatacgactacacattgtcgccgaccttccacatgtttttgcccggcaagccgcgtaaaacacgtgtaatgccatatgcctttacacttaaatggttcgacaaaacgagcatgaaaacgttgtacccgaacacggattttccgaatgcgttaagcgaaaaagaaaatcccgaccgcccggacgttctcgcactcgcggcgtatgacggcgacgagatcgcggcgctggcgggtgcttcggcagacacggacgcactgtggcaggttggcatcgacgtaaaagaacggtaccgcggacatggactcggcacaacacttgtaagtctgctgtgtgaccgcatcgaagcgctcggcaaaacgccgttttacggcacagtgctcgccaatttacattcgcagaacatcgccctcaacacgggtttttaccccgcgtgggtggaaatatcgagctttaaaagggaagaaacgaaagggtaaaccgaaatgagttcaaagtacatcaccgtgaccggtgcaagagaacacaacttaaaaaacatcaatgtaaagctgccgcgtgatcgactggtcgtgctgacgggactttccggctccggcaagtcctctttggcgtttgataccatctacgccgagggccagcgccgctatgtagagtcgctttcaagctatgcccgtatgttcctcgggcagatggaaaagccggatgtcgataacattgacggcctttcgccggccatttccatcgaccagaaaacaacctccaaaaacccgcgttccacggtaggcacggtgacggaaatttacgattatctgcgtcttttgtatgcgcgcatcggtgtgccgcactgcccggtctgcggcagagagatccgccagcagaccgtcgaccagatcgtcgaccgggtgatggagatgccggagcgcacgaaaattcaggttttggcgccggtggtgcgcggcaggaaaggcgagcatcaaaaggagtttgaggcggcgcgcaagggcggctttgtccgtgtgcgtgctgacggcatcatttatgacctttccgagagcatcaagcttgagaagaataagaagcacaacattgaaattgtcgttgaccgtcttgtcatcaagccggatatccgctcgcgcttggcggattccgtagagacggcgacaggactttccggcgggcttgttatcgtaaacgtggtggacggcgaggatacgctgttctctcaaaactacgcttgcccagagcacggcatcagcatggaggaactttcgccgcgcatgttctcgttcaataatcctgcgggcgcgtgcccgaagtgcacgggtctcggtgttttcatgcgcattgatccggcactcatcatcccggatgatcgcttatcgattcgtaagggcggtttgaagggcagcggttgggcgatggagggcagcaccattgcgacgatgtacatggaagcgctcgcagagcactaccatttttcgcttgatacgccgatccgcgacctctcaccggagcttgtagacattctgctttacggcacgaagggcgagaagattaaggtgcaccgcaaaagcgagtacggccgcggcacgtatgagacagagtttgagggcatcatcaacaaccttgagcgccgttttcgcgacacgtcctcctcgtggatcaaggaggaaatcgagtcgtacatgagtgcggtgccgtgcgacgcatgcggcggcaagcgcctttccaaagaaagtcttgccgtgacggtgggcggtaagaatatcagtgatttttgcgacctttccgttgtggacgcgctggcgttcctcgatacgttgacgctgaccccgcgcgaagagatgatcgcggcggcgattttgaaggaaattcgttcacgtctcggctttttgcgcaacgtgggtctcgaatatctgacgctttcccgtgcggcggcgacgctttccggcggtgaaagccagcgtattcgcttggcgacgaacatcggctcatctctcatgggcgttttgtatatcctcgatgagccgagcatcggcctgcaccagcgcgacaaccacaagctgctatcgaccttgatgcgtctgcgcgaccttggcaatacggtcattgtcgtggagcacgacgaggacacaatgcttgcggccgactacattgtggacatcggccccggcgcgggcattcacggcggcaacgtgatttacagcggcgacgtgcagggtattttgaagtgcccggagtccatcaccggccagtatttgagcgggcagcggttcatccccgtgccgcagaccagacacgaaggaaacggcaaaaaaatcaccattgtcggtgcgcagcagaacaacctgaaaaacgtgacggtggacattccgctcggcaagctcgtgtgcatcacgggcgtttcgggctcgggcaaatcgtcgctcatcaacgaggtgctgtataaacgtttggcgggcgagctgaacggcgcgcgcacggtgccgggcaagcataaggaaattcgcggcatggagaacctcgacaaggtcattcagatcaaccagtcgccgatcggccgtacaccgcgctcaaacccggcgacgtatacgggcgtgtttacggatatccgcgagctgtacgccagcacgccggaagcgaaaatgcacggttttacctccgggcgcttttcgttcaacattaagggcggccgctgcgaggcgtgccagggcgatggcattattaaaatcgagatgcactttttgcccgacgtttacgttgcgtgcgatgtgtgcaagggcaagcgctacaaccgtgagacgctggaagtgaaatacaaaggcaaaagcatttacgacgtgctggaaatgacggtggaggagggtcttgcgttcttcaaggaccacccgaaaatcgcgcgcaagctgcgcacgctgtgcgacgtgggactggggtacatcaagatcggtcagccggcaacgacgctttcgggcggcgaggcgcagcgcgtgaagcttgcaacggagctgagccgacgcccgaccggcaagacggtgtatattctcgacgagccgacgaccggtctgcacattgcggacgtgcacaagcttgtggaggttttacaaaagctcgtggacggcggcaacacggtcatcgtcatcgagcacaacctcgacctcatcaagacggccgaccatatcatcgacctcggtcctgagggcggcgacaagggcggcatgatcatcgcggagggcacgccggagcaagtggcggcaacgaagggttcctacaccggcgaatatatcaaaatgatgctggagcgtgacaaaaagcgcagggtggagcagaaagcctgacaaattcaaagtgacgtatgacgctgcgggcccggttttcgggtgcgcggcgtttttgcggctttaaacggattgacacggaaaaagaatctgtccaagatataaagccggaaattttgcgtctttcaggggtgcgggcggttcatatttacattttgttcaacacatttgcgtgtaaatcgggtagaatgaagaacggaaaggagaggtttgcggtatgtttggctatgtgcgtccgttcaagggcgagatgctcgtgaaagaatacgacgcatataaaggcgtttactgtcagctttgccgggcgctcggaaaatattacggttttccgatgcggctgacgctgagctacgactgcacgctgtatgcgttgctggcactaaatcagcgcgatgccgatgtaaaggcggagaaaaagcgatgctgctgcaacccgatgaaaaagtgcacgtatgtgtgccccgcaaacgaggatgtgtttgccgaagaggcgttccacaaggcggcggcgctgagcatcattatgacggtgcacaagttgcgcgataccgctgcggatgaagacgggctgaaagcgttcggtgcgcgcgttctgcgcttatttgcgcgacgcgcgatgaaaaaggcgagcaatgattatccgtttatggcggacgccgtgcagaaaatgatggacgaccaggccgatgccgaacacgcgaaggaagtttccattgaccgatgcagtgcgccgacggcggagatgctgcagacgatctgcgcggagcttggcagcaatgcgggcgaaaaggccgttttgagcgaggtggggtatttcctcgggcgctggatctacattatggatgcagcggacgacctcacggacgaccttttgcagcagaaattcaacccgtttattcaaaagctgggactagaaagctcgcgcgggctgcgtttattgcccgaagaacgaaaaagggccgacgaagagtgcaatgcggtattaaacggctcgcttgcacggctgctgccggcggtgaacctattgccgagcggcaaatttacccgaattttggagaatatttttgaaaaagggctcccggaaatgcaaagggagatccttttcctgcatataaagaaggagaaacaacatgactgatccgtataaggtcctcggggtgtcgccctcggcgacggatgaagaaattaaagacgcatacagaaagcttgcaaaaaagtaccacccggatcaatacggcgacagcccgctctccgagcttgcgggcgagaagatgaaagagatcaacgaggcgtacgacaccattgtttcgcagcgcaaaaaccgcggtgcgaacaataacggttacggctacaacaactataacacgtacaatgcgagttataacgccgggtatgcgggtggcagcagtgcctccggctttaacgatgtacgccgtttcattatggcggggcgcattgcagacgcggagcagatcttaaacggcgtgccggtggaaagccgtaacgccgaatggtatttcttaaaaggtacggttttataccgccgcggctggctggaggaagcgaaggagcacttcacgcgcgcgtgccagatggacccgggcaacccggagtatcaggcagcgctgaaccaggccatgaaccagcgcagcggcgtttacggcggctacaatccgaatatgaacatgaacaatgcgggtgggtgcaacgcctgtgacatctgcaacggtctgatttgcgcggactgctgttgcgagtgcatgggcggcgacctgatcccctgctgctaaggaggcgttttcatgcgctctaaagcggcgaaggtcgcgctgtgcggtgtgatttctgcgctttccgtggtgctgatgctgatgaccggcattgtgcccattgcgacgattgcactgcctgcattggcgggctgtttgacgattgctattgtggcggagacaaatgtgcgctacggctttgcggtgtattgcgttgtgagtgtgttggcgattctgctgacaccggacagagaagcgattttgttttacattttatttttcggttactatccgacgctgtacggacttttgatgcgcattaagcgtaaacctttgcgtgtgcttgcaaaattcggcgtgtttaatctggcgatggcgctggaaacggcgctggcggtttgggttttgcagatcccgctttccgaaatggaagtgttcggcaaatggtccatcccaattttggcggtgatgctgaatgtggtgtttgtactgtacgattactcgatgaacggattgatcgtcctgtacattcgcagactgcacccgcttgtacagaaatatataaaataaaacagcctatggctgcggttttccgtgtgccatgggctgttcgctttgtacagcttatattgcggtgaggtcgtcttttgtacagcctttttcgctgtaccgggctttttcgtagacgatgtgcagggcatcgttttggagcttcgcgtgggcttccgcttcggcgggggacatccagcgcgcgggcggctcttttgcggcgtgcagcagcgttttgcggtatttgcggcgcaccgcagcggtcggggagcggtcaaggaagccgggacggtcgcgcttttgggcgcgttcccgcacggtggtgcgttcgtcctcgggcaggttttccacaaggtcgcgccgatcgacaaacgaggttttaaacccgcgcgagatgcggatgcagccgtaaatgacgccgaagatgaggccgcccgcgagcgcgatgagcacgatgtattcgagaattttcatgatgaggacgagcacggggctcggctctgcggcgggaatcatctcatcaagcggcatatcgccgccggaggatgtttcggtctgctcgggcggggtatattcggcgtggatcgcctcgcgcggggtgtagcggtagccgatgtcgtttgtgagcagcggcggcagcaaaacggcggtacagaacacggctgcggcggccaaaagcgcacaggtgatgcgcacgatgcggcgtgcgggcatgttctgcatggcggcgttgacgtcaatgtaatcatcgatacggcggatgccgcgctgtgtgaggcacagcacgaagtaaacggccgcgaaaacgagggagacgggctggaaaatcaaatcggcgcggtcggtgaagacagagcacaggaacggcacggcgaacacggcaagacccgcatagccggcgtggtcaaacagagagtggctttcgccgtgcaggcggccgtaaagccgcatgaagcagatgaacagcgcgacgacggccatgaggacggaatcgaacaggaagccggtgagtaccgtgatgccgatgcttgcgagaatatagaaaaagatgtggcgcaggcattttattgcgaaccagctgagtgcgatgggggcgagaatcaaaaatccccgcaggatgttttgcagaatgacgtcttttgtcatgccctccgagacaaaatttaaaacgagcgcgtaaagcggcacacacagcatagtggcgtgcaggcagccgagcacgacgtataaaatgtggcggatgggaatttgctttttgaaaattttcattttgtcccctcccgttaaacttcccagcggacgatttcgacggattttgaggtctccgtgagtttgtagcgctccggcatgttgcggtcttccggcaggatccagatggcgtcactgccctccgttaaggcttccaaatccggcagaacgggcagcttttgctccttggagatgagcacgtagagatcgctgccgtgtgcgccgtcgtgcagggtgcggagaagctgcggcatgggggtgaggtcgttgcggcattccaatcttgcgagtcggcggcgcaggtaaagtgcggtgttgcggccggtgagctcgccggtggagagcattttgctgtctacggtgtctatgccgtttgagatgacggagaccgagatgccgtctgcgagcatgcgctccgcgagttcggcggcgatggagatggcggtctcgtttaacgcatccgtcacggcgctgccgatgccggtgcagtcgagcaggacagtgaccttttgggacagcgtggaatcgtgctgattgacgagcagcgtgccgccgcgcgcggaggccttccagttgatgtatttcatggggtcgctgcggcggtaatcgcggatgccggcaaactcgaacgggtcgtcgtacacacgccggcggctgacgagcagacccatgatcttgctgtacggaatgcggatgtggcttacggaaatgtgcgcgggcaggacgtagaactccgtttcctgcggaaaatgcgccacctgcttttcggtcatcagaaaatcgtaggacgtgaccgtggtggacgcgatgcggtaatagccgcgcttttttccgcggacgggtagtgtacgcgtaatgcgctggcgcacggacgctgtgaacacgtcgcggcggtaggtcatatcgctgacagtggagttttcttcgtcctgaaacaccacccagcggctcatatcgaagccgacctccaaaacggggagcggcaggtatttgttgttcacgatcgtttcgacgagattcgcttcctcgccgcagaaaatgtaatcgcggtcaaaggatatctgtacggtgaggttttcgtcccacaggcggcggaacaaaaggcgctgtgcaaagtaaaggacgagcaaaacgatcggaagcagaaggagcgcccacattactttgaccaatcctcagtcggcagggcgacggaggagagcacatcggtcatggcctttttctgggcatcggtggagccgacggagccgctgagctgcaaacggtgggcgagcaccggcacggcgacggtcttgatgtcttccggcacgacgtatgcgccgccgcgcaccaaggcgtaagcgcgcacggcacggacgagcgcaaggctgccgcgcgggctgacgcccatatcgatattcggccaactgcgcgtggtctgcacgaggtcgatcatgtaatcgagcaggacggggtgaatgtaaatctcctttgcctgcttttgcagcgcgagaatatcctcacgcgtgtagacgctttgcagcgtttcgagcggctcttccttcataaagcgctgcaagatggcgcgctcctgctcttttgtgggagaggccatagaaatgcgcattaaaaagcggtcgagctgggcttccggcaggggataggtgccgagcgtttcgatggggttctgcgtggcgatgacaaaaaacggcgccgaaagcggacgggtgacgccgtctacggtgatctggcgctcgcccatgcactcgagcaggctcgactgcgtacgcggagtggcgcggttgatctcatcggcgaggagtaggttgcagaatgccgggccggggctgaaaacgaaatcgtttgctttctggtcgaagtagttgaggcccgtgacgtcgctgggaagcaggtcgggcgtgaactggatgcggttaaactccagactgacggactttgcaagtgactttgcgagcacggttttgcccatgccgggcacatcttcgatgagcacgtgaccctcggcaatgagcgcggtgagcaagaggtcgatggtttcttcggaaccgaccatgaccttgccgatattttcacgaatggacgaaatgagcgttttactttccataaaagacctccaaaagacgggtgcgtttattctgttgtgggaaatcaacataattaaacggttaataatcggaataaggatacaacaaaacgaaagaaattgcaagcttcttttgtaaaggatggcaaagaatggagagagatatccgttctgtacggacatacctttgcatgaaaggatgcgtttcctgcaaaaacggtttgaaatccatagaaaacagcgaaaatatcccttgatttttgcaggaatatcggctaaaataaacattatgataccgtgtatacgtgtgccctgcccgtaggggcaggtatgcggccgcgactgcacggaggaaattttgcaggaagcggcgactcgtgctgtaaaatttcctgtcaggaaacgtaaagaaaggaaatcacccatgaatatccagcttacgaatcgcattaagcaaaatgcgagatcgttttccaaaggtcagaggttgatcgcgaagtatattgaggagcactacgacaaggtggcgtttatgacggcctcgaagcttggcgcgacggtcggtgtgagcgaatcgaccgtggtgcgctttgcgacggagatcggatactccggctatccggcgcttcagcaggcgatgcaggagatgatccgcaaccgcatgacgagcgtgcaacgccttgaaatgacctcgacgaacattccgcttgaccgcctgcttgacagctcgatggatcaggacatcgacatcattcgccgcacgaaggagtctatttcacatgaggagttttaccgtgcggccgacgcactcgtgaaggtaaagaaggtttatatcatcggcgcaggcagctcgcttgccattgcgacgttcctctcgcactacttctccttggtgttcgattccgtgcagcttatcagcgcgacgagcgaagcgcagattttacagcagatggtgcacatcggcgagggcgacgcgcttatcggcatcagcttcccgcggtactctaaaaaggcagtgaaggcgttgaaatacgcttccgaccgcggtgcaacggttgtggccattacggacagcacgctttctccgctgacgaagtatgcggagcatgtactgcttgcaaagagcgacatggtttcgtttgtcgattcgcttgtgggtccgctggcgcttatcaacgcgctcattgtgacggtggccattaaaaagaaagacgaagtggcgaatacactcttaaacctcgagaccatttgggacgagtacggcgtgtacgagaaggtcgaagacaagaccgacgaggaacgtaatgtttgatgcagtcgtagttggcggcggcgctgcgggcatgatggcggcgatcacggcggcggagcgcggcaagcacgtcttattattagaaaagaacgcacagcttgggcggaagatccgcattacgggcaagggccgctgcaacgtaacgaacaactgcgagccgcgcacggtgattgaatccacgcccggcaacggccggtttttgtatggggcggtgaaccatttcaccccgcaggacacgatggacttttttgaggggcttggcgtgccgctgaaaacggagcgcggcaaccgcgtgtttccggtctcggacaatgcacacgacattgcggacgcgctttggaagaagctgaaaaagtgccgcgtggaaattcggcagggcaatgtgaaagaggtgctgaccgaaaacggcagcgtcatcggcgtgcgcacggaaaacgatgtgtttgaggcctccagcgtgcttttggcgtgcggcggcgcttcgtaccccggcacgggctcgaacggcgacggcgcgcggctggcggaaaagctggggcacaccattattcctatgcgtccgtctttggtggcgctgacctctgatgacgaggattgcccggcgatgcaggggctttctctgcgcaactgcggcgtgaccgtgacggacaatgaaaagaaaaagaagccggtctacacggacttcggtgagatgctgttcacgcactttgggctttccggcccgacgattttgagtgcgagcgcgcacatgcgccatatggcgcccggcagatacacagtgacgctcgacttaaagccggcgctcaccccggaacagcttgaccagcgccttttacgcgatttagagaaaaacaagaaccgcaatttcagcaattcgctcgatgaattattgccgcaaaagatgatcccggttgtcgtgcggcggtcgggcattccgccggaagaaaagtgcaacaccgtcacgcgcgagcagcgtgcggcgcttttggatgttttgaagcactttacggtggagatttccggctttgcaccgctttccggcgcgattgtgacggcgggcggcgtttccgtaaaggaggtcgacccgaaaacgatgcagtccaaattaattccgggcttgtactttgcgggggaaattctggacgtggacgcgtacacgggcggctttaacctgcagatcgcctttgcaacgggacacgcggcgggcgaaaatctgtaaactatcattatatataaggaagttatgttatgtatgcaatagcgattgacggacctgccggcgcaggtaaaagcagcgtggcgaaagcggctgcaaaggcgctcggctttgtttatgtggacacgggcgcgctgtaccgcacggtggggctttacctgctgcgcagtgaagttgaccctgcagacgcagaagcggtggagccgaagctccgggatattcaggtcgatctgaaatacgaagacggcgtgcagcatgtcattttaaacggggaggatgtatccggccttatccgcacgccggaggtctctatggcggcctctgcgtgtgcttccgtaccggcagtgcgtaagtttctgttctccgcgcaggtggatatggcaaagaagtacaacgtcatcatggacggccgagacatcggcacgacgattttgccgaacgcacaggtgaagattttcctgacggcttcgcccgaggtgcgcgccgagcgccgctacaaggagctcaaggaaaaaggcgtggacgtgggctatgaagaaacgcttgcggacgttattcgccgcgacaagcaggacgaaaagcaatctaaggcagcggaggacagcattttgcttgacaacagcgagctggattttaacggtacggtgaaacgcttattggagatcgtggaagaaaggacgggcgtgaagcatggctgaaaataagaagccgaaggaacacctttcctggtggtatttccttgcaaagtacgtgatgctgtttttctttaaaattctgcacccgtaccgtattataggcagagagaacatgccgcttaccggcaagctgctcgtttgctctaaccacgtgacgatgggcgacccgatttaccttggctgcgcaataccgaaacgacaattacactatatggcgaaggccgagctttttgaaaacaagctcatcggcggatttttgaagagcctcggcgcgttcccaatctcccgcggcacgggcggggcacagggcattcagacggcgattgaccttttggaggaagaaaaggtcgtgtgcatgttcccggagggtacgcgctcgaagaccggcgagcttctgaacccgaaaatgggtatggtaatgctggcgtacaagacgcactgtacgattttgcctgtggcgatcgtgggcgagggcggcaagcctccgaaggtgtttaagaaaatggtcatcaacatcggcaagccaatccggtttgaggacatgggcctgaccgaagattctggtatgatttaccgccgtgtttcgcgcaatatttttgccgaggtgcagaagctgcgcgaggaaggtctcgatattatggagaacaggtggaaggaagtatgatccgcgtggcgaaaacagcgggattctgctttggcgtgaaccgcgcggtggagaccgtttacaaattgcttgacgaggacaaaaccgtctgcacgctcgggccgatcatccataacccgcagcttgtggaggagctcggccgcaaaggcgtgcgcattatagatgcgcccgaggacgcgaaagcgggggagacggttgtcatccgctcgcacggtgtaccgcccgaggtcatcgaaaaactgaaagcgctcggtgtcgattacaaggacgcgacgtgcccgtatgtgcagaagattcaccgccttgtttccgacggagagcgcgagggcaggcgcgtgatgctggccggcgatgcaaaacacccggaggtggagggcatactcggctgctgcaaaacgccgtaccgcaccttcaaaacgcgcgaagaactcgaaaatctattcaaaaatgagcctgaacttgccgaaatgccccttcttttttgtgaacagaccacttttaacgtagaagaatgggaaaaatgtttggatttcgtaaaaaaggtatgtacaaacgcttcagtttttgatacaatatgtaaggctacaacaaatcgccagcgcgaagcacgcgagcttgcgcgtgaaagcgacttgatgctcgtcatcggcgggcgtcacagctcgaatacggcgaagctcaaggaggtctgtgagccgtatgcgcagacgtatctcattgagacggcggcggagcttgcagccctgcctgtaaagggcaaaatgaatatcggcataactgccggtgcttcaacaccggcaagcataataaaggaggtacttgttaccatgacagacaaaattgaaacaaatgagcttaattttgaggagatgcttgaggaatcactcaagagcttaaatacagacgaaaaggtgcacggtgtagttgtaagcatttctcccaccgaagtgtatgttgacgtcggtagaaagcaggccggctacatcccggctaacgagcttagcaacgatccgaacgcgaagccggaagatcttgtaaagatcggcgacgagatggatctgctcatcatgaagacgaacgatcaggaaggcaccatcatgctctccaagaagcgcatcgatgccatcaagggctgggaagacattgcagcggctatggacgctgaagaaatcctcaccggcaaggtcacagaagttgttaagggcggcgtgattgttctgtataacggcatccgcgtcttcatcccggcttctcaggctgtagcaaatcgcggtgatgaccttgaggctctgaagggtcaggacgttcagttccgcatcatcgaagtcaaccgtcagcgccgccgtgcggtcggttccatccgttccgtgctccgcgagcagagaaaggcagcacaggctaagttctgggagtctgttgaagaaggtcaggagtttacgggtaccgttaagtccctcacgaacttcggtgcatttgttgacctcggcggcgtggacggcatgatccacatttccgagctttcctggaaccgcatcaagcacccgagcgaagttgtctccgtcggcgacaccgttcaggtttatgtcaagagccttgaccgtgagaacggcaagatctcccttggctacaagaagaaggaagacaatccgtgggagattctcaagaacgagtatccggttggcacggtttgcgacgctaccgttgtcggcatgaccacgttcggcgcatttgctaagatcctcccgggtatcgacggcctcatccacatctctcagatcgcggacagaagaatcgagaagccgcaggacgttctgaaggttggcgacgttgttaaggtgaagattaccgacatcgatttcgacaagaagagagtttccctctccatccgtgctctgctcgaagaccagggcgaggacgcttctgaggaataatttaaatcgtcaggtgtaaaattgcagggtggttcttgccaccctgctttacatgacggacattttaaaagtaaacggataaaacggcggttttatccattggaggaaacaattagatgaagcgcgtgaaaaaacctgtgttttttatcatcgcggctctgatccttgcgcttacatacacatcggtcttcggcgtttacacgcagaacggtgacgcgaagaacacatggatcaagggcgccggcgatataagatggggtattgatatccgcggcggcgtggaagcgaccttcagcccggctgacggcgtggaggcgaccgcagagcagcttgaagccgcaaaggcaatcattgagctgcgtatggtctcgaagagcattacggactacgagatttacaccgacgaagccaacgacaagatcattgttcgtttcccgtggaagagcggcgaatcggactttgacccggagaaggcgattgaagaaatttctgcaacggcgctgctgacattccgcgaaggtaagtcctacgagactcagacggtagacggcgagggcaacccggtttaccagacaccgacgggtacaacggcggaaaacatcattctggaaggcagcgatgtaacggaggcaaagccggtcatgcaggagaattccacctccggcagctacgattatgcgatttccctgacgctttccgatgaaggtgcacagaaatttgcggaagcgaccgaacgtctgaagggcaagacaatctccatctggatggatgacattatgatttcttacccgaccgttaacgcggtaatcacagacggcaaggcttccattaccggcaactttacggcagccacggcttccgaacttgccgcaaagattcagggcggcgcgctgccgtttgctttgcagacctcgaacttcagcaccgtgaacccgacgctcggcatgaagtctctggatgccatggtcatggccggcgtaatcgcttttgcgctcatcgcggtctttatgatcatcatctttaaggttccgggctttgtggctgtgctgacgcttgtgggtcagcttgcaatcacctttgcggcgatttccggctacttcccgtttgtgaacagctttacaatgactctgccgggtcttgcgggtattatcctttccatcggcgtgggcgtggatgcgaacattatcaccgcgagccgtattaaggaagaactcggcaccggcaaaacgctggacggcgccattcagaagggctgctccaacagcctttggtcgatcatcgacggcaacatcacgattttgatcgttgccatcatgctcatcggcgtgttcggtccgtctaacattctctctaagattttcggcgaatccacgaccggtgcgatctactccttcggctacactttgctcgtcggcgtaatcggcaacttcatcatgggcgtgttctgctctcgtctgatgatcaaatcgctttccggcttcaagccgctccgtaagaaatggctgtttggaggtgcggataagtaatgaaaaagtttgattttgatttctataagaacagaaaaattctgttcggcatctcgattggcctgatggtcatcggcttgattttcaatttcattcgtggcacgaagatggacattcagttcgtcggcggtgcgatgattaagtattccgtagacggcgaagtcgatacggatgaaatcgcgtccctcgtaaaagaagagaccggccgcgacgtttccgttgcattgagcaagacgttcggcacggacgcgaaccaagtgacgctgtcctttgcgggcaacgaagctgtgacgctcgatgaacagcaggcaatcgcgcagtccctatccgacgcgtatgccgaccgcacgttcaacgtggtggaatcgagctccgttgacccgaccatgggcgcgaagttcttccagaagtgccttgtttgcttgctcatcacgtttgtgatcctgctcgtttacattgcactgcgctttaagaaaatcggcggtctttccgccggcgttacggcgctcatcgcacttgtgcatgacgtgctgctcgtgtatttcgcgtttgtgattttcggtttctcgatcaacgatattttcatcgccgttatcctgacaatcctcggctactcgctgaacgataccatcgtcatttacgaccgtattcgtgagaaccgcaagctctccccgacgaagagcccggatgcactgccggctatcgtcaacaagagcctcaatcagacaatgacgcgttctattctgacatctctgaccaccttcatggcgctgcttgtcatctacattgttgcggcggtttacggcatcagctctgtacagagctttgcgctgccgatgatggtcggcacgattgtcggttgctattcctcgctgtgcattgcggctccgctgtacaccatgtgggctgtgcataagggcgagaagagcaagaagtaatctgacccgagctgcttttaagcaaacgtttctattacagaatgaaattcccggaaagctgtgtgctctccgggaatttttgtataggacgcattttacggtgcgggggatagaaataaacaaacgataaaaaagctaaaagaaaaccgggtaagctgccgtgcggtgtgctacccggttttggttttagatctgttgggatttgccggtaaggagccagaagacatcgacgtctaaaatttcggcgaaggctaaaagctcgatatccgtgacggtgcgaagctgaccctctaacttagagagggcagaggcgttgatgtcaacaccgcgcacctgcagctgcgcgagcagctctttctgtttcatgccacgattgcggcgaatgctctcaatacgtgcgccgactaagtttttgtctccaagtggttttttacggatgcgcatttgctcgccgcctttcaatgttctatacacattataagcgtaaatgcacaaaaaatcaattcgttttccgaaaaattatgaaaatcaactgctaacaattcgtgaacggtccgtaaaaccgggtgaattactctgtggtttcgtcctgttcttcggattttgtatcttccgcttcgccggaacgcgtgcggcggtaggcgagcggtgtcatgccatactttttcttgaagatagaatagaaataattcgtgttcacaatgccgatggcttcgctgatttggttgatgggcagcttagtctcacgcagaagctgctcggcctttttcatgcgggtgttgctgaggtaatcactgaacgaatagccgatctgcgtggcgaaaattttgccgaagtaggcggaggaaaggcctgccatgccggcgagcattttcagggaaagatcaggatttgcgtagtttttgtcgatgtattcctttgcggcatcggcggcaagctcgttgccgtatttgcggttgatgctttgatgatgcgccaaaatggtgatgaactccatgcagcgcttgcgcagcatatagacattcggtagctgacggtcaatttcgttcagcttatccatcaagaggggataggcggtgtcctcatccgtgaaggtagtggagaaatcgtcgagcagcgacatcatgacgtggttgaaatacgtaacagctgtattgaagctgacgtttgacatgtaggaaagcgcgagatcgaactcatgcgagcaggcatcgaggtcatttgcgcggatgtgctcggcaagcttcatgtggagcttattgtggtatgagttgagattgatattctggccggtctcataggcgaagaaaattttgccctgattacggatggcggaatattccagtgcgatgttcgtcgcctcatagcagaggttgatattgacggctgtctccacgatggtgccgatgcagatggtggtgttcatggcaaactcgcgctgcatgacctcgcacacgcgctcaagctcaggcacaagcttttccgggtatgcgttcttttgcaggggaagcaacatcacgagaaagttgtgcgaattgcggtacggtacgacactgccgaactgccccaaaacttcagtggcgaggttttcgagagcgtagctgtaaatgaaatagtttggatcatccgggccgaagcgcaactctttggaggctgcactgataatgacgatggtgtaatacggcgcggtgaggtcgatgccgtagctttggtatacttcgatgtaattcggaatctgaccatactcgccgtgcataagtcgctgaatgttgcgctttttggaatcggaataggaggagatgaggccttgctccagcttatcggctttcatgtacatatcggaaaacgccttgctgagctggtcgagctcatcgccggcatggtcgttcgacggctttttgacatagttgctgtatagcacttcgattggcgcagagagctttgcactggtgcggaacgagatgaacataccgacgcagagcacaaggatgcccacgagcagtgtgatgatggcgagctgggggagcccactgaaaatattcgagtacggcacaatattgaagatcgtaaagccggaggaagatgccttggcgtaggtgacgagcgcttcggtgtggttggcacaggtgtaggagaaggagccggaatcgtcggtcagttccggaaaatcctccacggagacaatggtattgtcggattttgcatgcgtgaaggtttgtgaatcaccttcagcgatattggtggcgaaaacctcgccgtaacggttcaaaagcaggacctgttgaaagccgtttgaggtgcgcaggctcgatatggaatcgttgaaataatcttcgtccacgtctacgatgatgaggtcgggcgagccgcctttgcgtagctgtacgcggaagacgaaggaatagacataacgagtcttaagctgctgtgtggcgtagtttgcaccgatcatgcgcagaaggcaggtatcggcgccgggattatcgggcaatctactataatagtatgtaatatcgtcatctgtgagaaaatctgccgtagagctggagacgaaacggttggaggcggagttatagagacttacatagcgcgtatagctctgcgccgtttggatctcgcgcagcttgatgcctgcgtcggcttcgatgaggcggttgaaggtattggaggagaggcaacggttcgtattgctgttctgcaaaatttgattattaacggagcgcatttggctgtagagcatgtccgtcatctgacacacctgctccaactgatgcacagaataggtgcgcgcagagctgacctgcaaatttgcgtagatggtgaaaattaaaagcgtgacgagtataacggccatggccaccacgcagaaaatactgaaaaggtaccggttgaacagccgggtttttacttttttaaacaaaatacaacactccaaatacagaaagagaacgaaaaacacgatttagatttcgtataactctatgataacggattttggcactaaacgcaagcgaaaaatcagattattgattcaaatcgtaaaaaaccgtagtttcatatcacgataagccgaaaaaagtgattcgattctcaaaaaatggagaaaagcgaaatttgtgaagtgtcttgaaactgccaaaatgcaaagttgttttgaaattttggagtttatcgcaaaaagaatactttacaaatcgttcacaacgtgttaaagtttattcatcgaaaacaaacaaacggtttgcagaaacggtatctctgcacggggcagaggtttcgggaagacccatgagggagggcgcccggtgcgctgtgattgcaaaacgacacgctttggcaaacaccaagttttgtcggcactttgttttcagcaggaatagcgatattccgggttcgcatttgcagagtcaatatataaagcaaataagctttactttatatgtgcggctgtgcagaggtgaacaaaactcttccttatattatatagaagagacacattattcggagaggatgatcgcaaacatgagtaaggcgtcagctttggttgatgtcagcaagaagagagtgaatccttttaaagagctgtggacaaacaagtttttgtacctgcttgcgctgcccgcggtcgtttacactttcatcttttcttatttgacactgccgtacattgtcattgcatttgaaaagttcaactacaagacgggcatctggagcccgtttgtcggactcaaaaacttcgaatacttcttcaaatccagctgggcgtggaccgttacgcgcaacacgctcgtcatcaacatcctgttcctcatcgtcggtacggtttgctccgttgttttggcaatcgtcctcaatgaggtcaaggcgaagaagttccttaaggtttctcagtccatgatgcttttcccgtactttatttcctgggttatcgtcagctacatgctgcaaggtatccttggtacagagacgggcctgctcaacaatctgatgggtacgcgcattaattattattccacccccggctactggtacccgattcttctgatcctcaacatttggaagaacacgggctacaacacgatcgtttaccttgcagcgatcaccggcattgacgaaggcctttacgaagcagcttacatcgacggcgctacgcgctttaagcgtatcatttacatcacgatcccgctgcttgcaccgaccatctgcatcatgaccctgatgtctgtcggccgcatcttctacggcgacttcggtatgctgtatgcgatcatccgcgacaacagctcgctgatgccgattgcagaagttattgatacatacgtttaccgtacatttaagaacacaggtgatccgagcctttccatggctatcggtctctatcagtccatcgtcggcttcattctggtcttcacagcaaactggatcgtcagaagaaagttcccggatggcgcactgttctgatacagggaaaggagacaagctcatgaacagcacggttgcggcggctacaaagccgtctaacaccaacaacaaaatcaagcacagcacgggggagaacgtcggtacattcgtcatttatctcgtcgttgctctgttcgcactgatatgcgtcctgccgtttgttctcgttatcattgtttctttcagcagtgagaaatcgattacgatcaacggttactctttctggccgagcgaatggtcggttgcagcttataagatgctcttcctgccgtcctctgctgttccgcagtcttaccttgtaacgactatcgcaacggttttcggtactgtcgttgcatcgttcatcacgttcggcgcaggctacacccttgcaaaccgtacttgccgttacagagacggtctgtccctttacttctacatcaccatggttttctctgcgggtcttgttccgtggtatatgatgtgtaagatgctgaactgctatgataacatctgggcacttatcgtaccgagcctgatgttcaatccctttaacatgttccttgtgcgcaactttgtgcgcggtattccggccgagctgaacgaatccgcaaagattgacggtgcaggcgaagtgaagattgcattcggcatttacttcccgctgtgcctgccggttctggctacgattgctctgttctatgccattggctactggaacaactactttaatgcagttatgcttgtgaatgatgagaagtattactctttgcagatgctcctcttcaagattcagtctgagatcacctcgttgagcaaactctccgccggtgctacggtcaatgtaaacccgccaaaggaaagctttaagatggcgacctccgttatcaccatgggcccgattatcattctgtatccgttcttgcagaagtactttgttaagggcatggttgttggcgccgttaagggttaattgcccgcacacattttaattcggtgtttaccgtggaaggcggttacacatatatcaattttcaaggagttgaagtaagaaatgaagacaacgaagaaactgctggctatggctctggcagctgcaatggtcgttacggcttttgcaggttgctccggcaacaacaacacttccagtgctggcagcacatcttctgcttcctctgaggcttctacttcgtccgatgcttccacatctgacgaatcttcggcaacagaggacgacggcaccattcacccgatgcgtatcgtacagccgggcacgctttgcgcggactatgagacaggtatggcagctgtcaacgagaagctgaaggaagacggcgtaaacattgaagtttccgtcacaagaatcccgtgggacgcttatgctgagaaactgaacctcatgctgacgaccggtgaagagttcgaactgctgcatgttatgcaggacgttaagaacctctccgctatcgcaggtatgggtgctatctcctccatccacgattccatccagaactacccggatctctacaacaagttctccgagacagactggctgggcaccctctacaagggcgaagagtatgcagtaccttgctactggagatccttcgacaacgttatgtcctacatgaactaccgttccgacatcgctgagaaggtcggctacgatgagttcccggacacaaccgaaggcatcatcgacctcatgaagaagtctcaggaagagattctcaacgaaaccggcacgaaggcttacacttggttccaccagaaccaggatacggcgcactggctccacagaagctatgacacctatccgttctatgttgagaactccctcggtctctgcctcatccgtcaggacggtacggttgattccttctatgagtctgaagaattcaagaaggatgcaaacacctactatgagatgtatcaggccggtctcatcgacccggatatcctcaaccgcgactctcagaagaagtacgacgacgctaagttcggcgcaatgctcccgtctcagacgtttgacccggctaccggtgttaccatgcagcagaacggcgttgaaggcgctgaggttaagtgggttgaagctttcggcgacgatgttccggacatgatctacacctatgtgcagaacctgaacgctatctccgctacttccgaggatccggaatccggcctcaagttcctcaactggctgtatgcttccgaagagaaccatgacctcttccactatggcattgagggcacgcactacaccaagaccggcgaccacagaatcgagcaggttaagggcgacgacggcaatgtactgtacaccatggatacctggatgacaggctacctgccgtacatggcttatgcttccgatgctccggacgaccacatcgattacatgacctataagtctgagaactacgtcatctctccggctgctggcttcatctttgatgcttccaacgtacagagcgagctgacgaacctccagaccgagatcatctcctccatctacccgattaaggtcggtatggtttcctatgaggacaacatcgatgctgctatcgagaagctgaaggctgccggcctcgacaagtacatggaagagtacagaacccagttcaaggcttatctggatgctaacccgaacgtactcgagatcgcaaagggcaccacggaaggctaattgcttttctaaaacctgaataatgatctgaatgcagggcgcaggacgcaaaaggtcctgcgcccttgcttcattattcttactctttaaacttgaaattgatttaagatgtctgttacaccgaatatatcggtgcagaaaatatgagttctgaagagaattgggg

SEQ ID NO: 1705 - DNA, 7873 bp, Unknown
  gut microbiota DNA sequence
cactccggaatatccgaaaccaaacagcagttgccgtagctcattgcttccagtagacttagcggcattccttccagatcagacggcagcgtgtagatgtaagcgttgctgtacagttcatccagcattgctccctgcacaaacccagtaaagagaatccgatcatcacccttcgccagttctttcaattcctccataaaggaatccgtatcactggagccgcccgcgataaccagctttttatccgtcttgacattcttgaaggcctcaaccagatatcgaatccccttctccggcaccagacggccgaggaacaatatgtatgagtcttttttcagcccgaacttatctgtaatcagacttgcttcccgaatctgtggtctattcacgccattagggataaagtgcgtttctcttccataagtttccttaaaatagtcctgcactcctttgctcagaacgatgacctcgtccgcatatttcgcagcatttttttcgccttggtggataaacttagaaccaagtcctgattgccatttctcgcgctgccaatcaatgccatggacggtaacaacaactcttttcccaaacatcttcggcaaccatgcaaagaacgccggtccttcggcatgaatatgcactacatcgtatcttccaaatgcactacaaagtgctgcgaaaaaggaagagcttaccgctgcaagacccttcttctcaatggtcggaacaaccttttgacggatgccgtcatattcaattgttttgtcatactctgcaccgctcacatgatggcctgatctgttgtaacaggtcacgtcacagccattctgtgccattcgggtgcagagctctttgacaacgatttctactccgccttctctcgataatcgcttctgtccgaacatcgcaatcgcaagtttcttactcataaatctttcccacaatcccactcaatttcttcatctatatttcagctaacacaaaaagcggataggctcgtacacctgtccgctggctgtcaccccaccctcatggtcgagatttcttcctgtacggcatttctgccacacagaaagatctgtcgttcattcttcgggtaagaaaatatgaacttcgggtagcggagcctttcattctctgccgtaccccctattatgacagccgcgtattatatttctagccccagttccagcaactgcagtcgtatattttttacatttttattcctccgattttgtatgtattctaatttctatccgatatttatacttataacttatccattttcctgtgccccaacctttcaaagatcaaaacacatatttttttacatagagccatcttttttcagaactaccattattgttttaaaaaatatttttatatctagcccaattttccaatttgtgatatactctttatcaagacgaactacttcttcaaaatcggtaatatcacttcgtccgcttacctgccacataccagttattcctggcttaatcgcaagtcttgcacgatggtgtagctcataaaaatttgtttctgaaatcaaaggtggcctggttccaattattgacatatcgcctttcaacacgttaaaaaactgcggaaattcgtcaatgcttgttcttctgataaattccccaataccagtcttatgtgttccatctggaagaatcttatttccaataactcgtgggtcaaaatccaatttgaacatcttttcatcacccagtttgttatctttcatcagttcagccttacgttcttctgcatccatatacatgcttcggaacttatacattttaaatctctttccattctttcctacacgttcctgtgcaaagaaaatcggtcctggtgatgctatgtaaattgctggagcaacaaatataaacaagattccagtaatcaagcatcctaccaaacctccggcaatatccaccagacgtttcagcatcaaatctcttgtagatgcatagttaatactggtagtcagtactgtataatctccgactttttctacaagctgctttttccccggcacgctttgtacctttgcaagatttagatgtactgttactccggtttccgtaaactgctcaatcagttcttttggatatggaactgcaccggatgtcacaatcagaacttcatcaatccattctttgcagacatattcggcagcattttccatatttgccactactttcacaccattaatatactttcctgtcatttccttatctataacagcaattccagcaatcttataccgggcataattatgctctttcatgctctctactactgcactcgctacatctgctgagacaacaagaagcaaggaacgattttcaccatcttccatttcctttctaagcaaatgtttccacagctctcgtaccagataagtaagtggaatatagataacgatattcagtatcaatgccagtctggaatatgcatgtccttcctgaagcataaacaaataaagcactaaacatgctccaagaattactccatgctgtgcagttacaacaaaatctttatagtactctcttttcaaaacgttttttagtgttcccattgcaaacagcactaccaaatctgctacttccataaagacagccatattcctgtaaagaattagccgatatggattagctccgtatccgcttaacgcatacgccagaacgaacgccacctgcaagcaaatcaagtccaagatgataaaatccacatgttttatccatcctgtagaatcttttctatacatacgttctttcccctttattcatttttcagatttcaaagcttaatcatccgcaaaagcaaatcgtgtttgaacttggacatgaaacctctcctttattagttcaatatcaaatccctcaattattctaaaatatcacttttccactttttcataaaaaacattcatcacaagcgcctgcaaggcgtcttcatcgggatagaattccatgtattcctgccctaccttggcttcaccgtctatggtgcggatctcggaaacatcgcttttactgagtaagtccgcgattttagaaagcttttcagctgtgcagtcggaagtaagataatcgctgacctgcagaatcgcattcgtagcgaaccacgcatcgctgtcggctttttcggttagcttcttttgcagtgctataaggtactggcgctggcgctccattctgcgcagattagagctatcctctagcccgccacgtgtgcgcacataagtcagtgcatgattacccattaatgttacggtctcgccttgtacaagcgttgagtcaatggaggaaaaatcatccatcacttccacctcgacgccaccgaccagatcatttaaaattgccacaccatccattgtaatggagatgtagtggtcaataccaacgccatacagcagattggaaacagcctctgccgtgtttagacagctgtcccgctcacccgaaccgtatgtatgcgccaacgcaagctgaccggtaaatgtaccggccacatcgccccgaacgcccaagatctgaatcttcgtcatcgtatcgcggttcagctggatcggcgtgcaagcgccggtctctttgttaatcacgagcagcatcagaaagtcagactgttcattatttaaatagttgctttcttctgtctccgcatatttatcgagacccatcagcagtacggtctcaagatcattgcggcgcgcataccacccgccgttataatacgtcagctcccgcgtatctccggcttcctcaagcgcagaggaactgcttccctctgcgtttgaggaaacatcaggggcagtatcctgtccctgattttcatccaaattccggagtaaaagagcagctgtcatcaaaagcatgaggacggataacccgattaccatgccttttaagacgcgcatatttacccgcagcttcataaattagcccttacgcttcttagaagcaacaacagagccgatcacagctgcacatccgaggcccagagcagcaacgcctgctacacgcagaacgccgttgtcactggtctgcggagaagacggagcattggtgctcggcgtcgttgtgtcagcagtttcctgcttgtctacaacaaaagcgaccggggagaagctgtcaaacgttacgtcaaccgtaccgtcagcattctgctttacgcgatctttcgggataatctcccagttggagccctcatagttgtgcagaacgatcagcgttgcagactgggaaagacccagattgaagcgaacggtgacagagccactctctgctgcggcacccgtgacggaaacgtcgaacaggtcacgaacaacgagatcttcaacagaagcctcgctgccgatctccttcaggtaatcgccgatggacggtgcgatgtcggtgagcgttgcagcagccttaatctgctcgtaagcagccttcaagccgtctgcaatagccgcatcagcgctgtctgcagcggaaaccggagttacaataacttcgccgtctgcaaacgcgttaccgtcggcatccgttgcggaaacaactgtcggtgcacccttctgctcaacgctaggggtaaagccagcagcaaaagacggcacagcaagagcaactaccagcaggattgccgataagattactacgattttcttcatggttaaaacttcctttcctaaacgggtgattatacaccatttattattcgacctcatcgacacattttgcaacgacgagaaatcgtctgtgtgaattgccctggaggcaggtggacaggataagcagtttatcctctggggtaacagccacatctgtactgtgctgcgcaccaatctcacgcacatcgaaaatgctgttcaaaaacgcattgtatcggcgcttgctcgtgaaatcatacgtgtacaaaatgtggcggttatcgtacggcacagctgcaaacaccttgtagtgcatttccttttccggcagatacacggtgatatcgccgtgctccgtcagcgcattcgattcggaatagacctgctgcagcttgccgaacatcgtgccggcaagcatctgatgcccataaagcaccgtagcggggtcgtccatttttccgtcgttataagagctttcggaaaagattgcacccatggagttatcgtttccgtcgctgtcgtgcgtcaggtagtaatcatcgtcccccgcacgctgcaagatcggaaaatcaaactccgtacccggaatgcgcagccaagcgtaaatatccgggttttctttctggagtgacgcaaagtcaatcggactcacatacggcactgcggaatctgtggatgcggaagataccgcttccggcgttgctgtcggtgtaaccgtagccgtggcttctggtgtggggtctgccgtttccggctgttttccgccgcgaagcagaaaaataccgagcacaatgcaggtagcgcccagtatcgcgaccaaaataatcagtgcgcgctgtttcacaggcgttccccctttcctgaaagatccggcaggttttgttgaaattcgcgccacacatcgcgctcaacggacttttgaatcacttgtattgcttctccgagtctcggaggtcttgtagtcatgttgtggcagtcggagcccagcacatcaatctcgccgcgctgcagcatcttcactgcttttcgctttgtcctccagcttaaaaagaacaaagcgttgcattgcattttcacgccctgcgcccgtaacgcctgcaatgcgtcactgttgtgaaacggcaggtagcgctcaatgtgtgccaataacacctgtgtgtcccgtcggttttgaatctcggccacttcattgaccatgcggcggctccactttgcaaaaggcatttcaagcaacagtatgttcgtgttttgtatccatagcgcttccagttcgtcaatacggctgatgccgtcaaagtaacaaacctctgcgccaagataaacacgcggcaaatccggcgttaaagcttcctgcagccgcgcggcacaggaagcccgtcgctccaaaaacttctgcgggctgtactgcgaagcgtaaaaatgcggcgttgcagcgatttcggtgatgccctgctctgcggaggtccgcaaaagcttcaggctctcctccacactgctgctgccgtcatccatcttcggcagaatatgggaatgaatatcgagcatgcgttatttctcttttccggtcttatttttctcaccgtagccgtagccatagttgtaatttttatagtattttttctttccctccaacgctgcgttcgtcatcacgaagcccaagatcttcgcttccgcaaagtgcagctggcgcacggtttctgcgactgaacggcgtgtagcgtaattctggcgcacaacaagcagcatgccgttcatgagcttcgatacaacgagcggatcggaaacagccgttacaggcggaagatctaacaggatataatcgaaatcacgactcagaacatccagtgtaatgcgcatctgctcggagccgagtagctcagacgggttcggcggaatatcgcctgcggggatgacccacatgttcttgtgcagctcgcagcggctgagcacatccgcgcccgtacactggcctgcaagcaggttggaaatacccttctttgtctgaatgttcagacgctttgtgtacgtaggcagacgcatatccgcctcaatgacaagcacaagcttgccggcttccgcaatggaatacgcaaggttcagtgtggtggtgcttttgccctcgccgcgcatagaactcgttattccgataattcggcatttctgctcatcggaaagcgcaaagtcaaggttcgtacgcagaagcttgtatgcttcggaagctgcaaagtttaggttttcaccgagcattgcgccgtactcgtagtcggaggctgcattcctatattttctcatgcggtttcctccttcccacctttgctgtcatctctataatagtaatagttgcttttcgaattcttctccgtcagatccggcaccacagccagcagcggcaggtcaaacgtcacacgtacgtaatcttcgttgtgcacaacatcgtccagaagatacagaaccgtaaacacgccgcagctcagcacaaagccaagcattgcaccgagcatcgtgttcttagaaagactcggcgaagttttcttggacggcaccacagcgtaatcaacgatgcgcacggaactaccctctacaatgtccgcaatgcggttcggcagcagctctgcaatcgtgttcgcaatcttctcagcttcttccggactcgcgctcgtcacagagatggaaaaaacctccgtggagttcacagcgccggcttcgatcataccggaaagctgctcgtaatcatacggcagatttgcttccttaatgacctcctccagcgtgccgcgggtcttcaaaatgaccatataggtctcaacaaggctctgcgctgcggttaagtcactcaggttcacctgcgtgcttccgacggaaatggaactgttgttcacatacatcatggcgctcgccgtataaagcggtgtgatgaagagctttgtgcccgcaaatgccatagcggccgtgataagcgtcacaagcacaatggcccatgctttgtgccacagggcttttgcaagctgcagtagatcaatctctgtttcgttttctctgttattacccacttgttttccccattccaaattttcttttttctgcacatctgcgaacaccccatatataaaaggaatacatccgttttcccatcaacgaagggaagaaaatcagttgcacaaatttattcttattctactatatttcgacaagaaaatcattagcatttatgtgcaaacgcacgac

SEQ ID NO: 1706 - DNA, 5913 bp, Unknown
  gut microbiota DNA sequence
cattatttttcctccacttcccgcagcatttcttccaaaaatgccggcagataaaatgcgccgacatgcagacgggtggtgtaatagcgcgtgcgcatattgagcgcgttccactggttggagtcaaggtcgttgatcgggtgatatttcttgcttgcaaagccgaaaagccagtaacccgcggcgaaggtagggatatgcgcctgataaaccttgctgatggggaacgtcgttgcgatgcgctggtggctgcgctgcatggcagtggcatcctccgcatagaacgggctgccctgctggttgaccatgatgccgtcctcacgcagagcattatagcagtttccgtaaaattcgcgggtgaaaagcccctcagacgggccgaacgggtcggaagaatcgacaatgatgaggtcgtattcatcttcacacttgcgaatgaacttcagtgcgttttcatagtagatatgtacacggcggtcgtccatgcggcaggcgttgctcggcaggtaagcgcggcaggcctcgatgacctgcgggtccatctcgacgaggtcgatgcgctctacgcggtcgtagcgggtcagctcgcgcacaacgccgccgtctcccgcgccgatgacgagaatgtcctttgcattgcggtgcacggacatcggcacatgggtgatcatttcgtcgtagataaactcgtcgcgctccgtgagcatgacattgccgtccagcgtcagcacgcggccgaactccggcgtttcaaaaatatcgatgcgctgataggcgctttgctttgaatataactggcggtccacacggatgctgtgcttgacatccggcgtgtgaaattccgaaaaccacatttccatttttgtccctccttatgcaagcacgttcaggcggaggatatcgggatcctccgggccggtcatgctgcagcctttggctttggcgtattcgatgtaatcgaggatctccgccgtgatgcgttcgcccggcgccaagatcggaatgcccggcgggtagcacatgacaaactcgctgcacaccataccctccgtctcgcggagcggcaggctctttttcggtgcgtagaacgcctcctgcggactggcggcaacctcggggtcgatgtactcctggctcaaaaggccggtgccgtccgtgctgtaccggcgcttgatctcggccaaagcactgacaaggcgctccacctcctgcgggcggtcgccgatggagaggtatgcaaggatattgccgatgtcgccgaactcgatctgaatatcgtattcgtcgcgcagaatgtcgtagacctcgatgccggcaaggccgatgtcgagcgtgtggacactgagctttgtcgtatcgaaatcgaacacggagttgccgttgcagagttctttgccaaacgcgtagtagccgccgacggcgttgatctcctcgcgggcgtattctgccatatcggcgacctgatggaacactttgcggccgcgcagtgccagattgcggcgggagatgtccagactggacatgagcagatagctgcccgaggtcgtttgggtgaggttgatgatctgccgcacataaccggcgtggacattggggccgatgagcaataagctcgactgtgttaagctgccgccgcttttgtgcatagaaacggccgccatatcggcacccgccgccatagcggagaccggaagaccgccgccgaaataaaagtgcgtaccgtgtgcttcgtccgcgaggcacagcataccggcatcgtgcgccatttgcacaattgcgcgcaggtcactgcaaatgccgtagtatgtggggttattgacgagcaccgccacggcgttcgggtgttcgcggatggcttttgccacctgctcgcgcttcataccgagcgaaataccgaggcgatgatccacctccgggttgacgtagaccggcaccgcgccgcagagcaccaaagcattcaaaacgctgcggtggacgttgcggggcagaataatctcatcgccgcgcttacatgcggtgagaaccatgctctgtacggagcttgtggtgccgcccaccattaaaaacgcatgtgccgcgccgaacgcatcggcggcaagctcctccgcctcccgaatgaccgacaccgggtggcagagattatcgagcggcttcatgctgttgacgtctaacccgacgcactgctgacccagaaaggcggccagctccgggttgccgcggccgcgcttatgacccggcacatcaaacggcaccacgcgcatgttgcggaatttttcgagcgcttcatggattggtgcgcggcgctggtcgagctttgcgcgttttacattttcgttcatcttttccctccgttcaaagccctttgcaaaacaagaaacgcaagcccggcacgtaggtgcagaacttgcgtttgaatcgcttattttttgggcgcatgttctcggaacataaaaacatggtatcccggaaagcggagcgtttcagagtctatatagcaattaaacttttactactcttattgacgtttcacaagtctgcgttttagcgcaatttcatggttgcaaaggaaccatcttataaaatctgagctttttaactcagtcaataaggcagccgaagctgccggtcggcagtggacccggctgtccgtatggccttagcccaaaagggcggtccaaaagtaaaaattgctttgaaaaactcttacatctcacttcgtctttcaaaatcgatatgagtatatcataaacgacaaatcgtgtcaacaaaaaatttcaagccgcattatttccagccgcgggcggtggggtcaagcatttcggctgcggaatatatgagcgcattgcagacggcggcggctatggtgctgccgcccttgcgcccaaatgcaacgatggcggggacatggtgcttttcgcacacggcgaaaatattttctttgctctcgatgacgttcacaaagccgaccggcacaccgatgacgagcgcggggcacagaccgttttcgatctcctcggcaatggcgaacagcgcggtgggcgcgttgccgaccgccaaaatcgcgccggggtattcttttgcagccttgtgcatggcggcgacggcgcgcgtggtgccgctttcttttgcgctttgggcgactgcggggtctgccataaagcacagggcttccccattcagctttttgagacccggcttggaaacacctgcgagcgccatattcgtatcggtgatgaccgtggcgccgttatgcagcgcttctatggctttttgcacggcattttcggtaaaatgcagcgtttcggcgtactcgaaatccgccgtggtgtgaataacacgcttgacgacggcaagattttcccttggtatccggatatgcctttcttcaagctcttttgtgataatctgcatgctggtgctctcaatatcggcgggcagatgatgctgcgggatcatgctttgcaccccctcgggttttccatgcccatggcgcggtacacggcatccatatcgaggctgttccgcacgccgtcggctaaaatgtcgagctgctcgcggcggtattcctccatggaaacaggcgcggcggctgcggggtctatccccttgcgggcgcagaggtattccgcaagcttttcggtcagctcgccgctgtcaaagagaccgtgcagatacgtgccgaagacgttttgatttgtgcagccctcttttgtgccgtccgcatgcgtacagaacggctcaccgcggacgatcgtattgcctgtgtgaatttcgtaaccggtgagcatcgcccctgtaaacggcgcggcgatgacttcgcctgtgacttgcgcgcgatgcttttccgtacagaaggtcgtttctgtcggcaataagttaagaccgcgcagcgtttgcgggcgaccgctttcggagccatccgggtcgtgcaacgtctcaccgagcatctggtaaccgccgcagacaccgagcaccggcgtctctttcgcggcgagctctaaaatgacggcttcgagtcccgactggcgcagccagaggagatcctcaaccgtgtttttcgtgccgggcagaatcacaaggtcgggcgcaccaagctcgcgggtgttttgcacgtagcgcacatccattaaagggtgctgctcgagcaccatgaaatccgtgaaatttgagatgtgcggcaggcggatgacggcgatgtccagcggacgcacggcgtcttttttttcaaggcgctcggaaagggagtcttcgtcctcgatatcgacgcgcagatacggcacaacgcccagaacgggcaggtgcgttttgtcttcaagcatggagaggccggggcggagaatttcgacatcaccgcggaatttattgatgacaagtcccttgatgcggtcgcgctcgtccgtctccagcagctctacggtgccgaaaagctgcgcgaacacaccgccgcggtcgatgtcgccaacgagcagaacgggcgcatcgacaagctttgcgagtcccatgttcacgatgtcatccgctttcaggttgatctccgccgggctgcccgcgccctcgatgacgataacgtcaaaatcttctgcaaggctgttgtaggcgcgcagaatatcgggaatgagtgattttttcatcttgaaatactgcgaagccttcatctggccgcgcacttcgccgttcacgatgacctgacttccgacatcgctgctcggcttcaacagaatggggttcatgcgcacgtccggctccacacccgccgcctgcgcctgtacgacctgtgcgcggcccatctctaagccgtcacgggtaacgaagctgttcagcgccatattttgacttttgaacggtgcggcgtgcagaccgtcctgcgcgaaaatgcggcacagcgccgcgcataataaacttttgcccgcgccgctcatcgtgccctgcaccatgatgcacttggcttttttattttcgctcatttcagcacctcccgcatgattttcagtagcttttcgttttcctccggcgtgcgcacggcggtgcggtaccaggtgttatcgagccccgggtagtttgcacagccgcgcacgacagcgcctttttcttttagtcgctcgccgaaatcttccggcgctttgaataacaggaaatttgcctgcccgtccaagacgcgcaagccgagcgagcgcagggacgcgatcattctgggacgctcccgtgcgattaagcttcgcacgcggtcggcgtattcggtttcatctaacgccgcgacgcctgccgcctgtgcgagtgacgagactgcccacggctgccccgcttcacgcatattttctaataatttttcatctccgctgagtacataaccgagccgcacgcccgccatggcgtataattttgtgaaagctttcagaataacaagctcggggaactgcgctaaaaagtgctttgcagtccgtctttcgtgctccgggagaaaatcgaggaaacactcgtcgatgacgggcattgcatgacacgccctgcattttttcagaaacttttcgagaaaatccgatgtaacaatctgcccggtggggttgttcggttgacataagaacaccatatcgatggtttcatggagagcagagagcaactcttcggtgatttcaaaatcgttttcctcttttaaaaagaaatattcgacttcacagccgacggttttgagtgcggatgcgtactctgcgaaagtcggcgcgggcaataatgcgcggtgcggctttttcgcgagcacgagccgaaaaatgaggtctgccgcgccgttgccgcaaagaatttggttttcgtgtacgttttcgcttgcggagagtttttggcgcagttctctgcaaagcgggtcggggtagcggtctgcggtgggcagtgcgtttacgattgcctgtgcaacgccct

SEQ ID NO: 1707 - DNA, 1911 bp, Unknown
  gut microbiota DNA sequence
ctcgcacacctcgctcgtagagccctgcaaaacgccgatcggaatcaagcgctcaccgagatatgcctggaacgcgtggccggcttcgtgcgttaaaacgtccacgtctgcagaagtaccgttaaagttcgaaaaaatgaacggtgctttgtattccggcaaagatgtgcagtagccgccaaggtgcttgcccgggcgcgtctcaaggtcaaacagctcgtacttcgtcatgaagtcgaagaattccttcgtttcgggcgagagcgcgccgtacatttcggtcgcctgccccaccatataatctttgccgccgataggatctgcgttgccgcctgcaaatgtcaaactctcatcgtagtatttgacggaatccaaaccgaggcgctttgcctgcgccttgcgcatgcggtccaccgccggcgtgatgaccgcgcggatctgctcgcggaatttctccacgtgctcgggcgtgtagtccagtctgcccatattgcggtacgcaagctcggtgtaattgtcatagccgagcttcttcgccatctctacgcgcacttcgatgagcttatcgtacaactcatcgagcttgtcggaaacgccctcgtaaaggttcgcccacttttcaaacgcttctttgcgctccttgcggtcggtgctctccatatgttttaaaagaccgtagaaattgcaggtctcgccgcggaaatccaccttgcaggaagctgcagccttggaatactccacggaaagctccgattctttcacaagctccgggataatgcgctcgtcctgcgtcttgaggtcgttttccaaaaccgcgatgaaatgcgcgccgtattccttttcaaagtccgcacggaacgggccgttcacaatgtcttccctcatcgccttctccgccgggatcaggttcggcagattttcgttcaggtacgccatttccgcttcgtagaattcatctgtcgtgttcatcgtgttgcggatgctgcaaagcgacgcaatcgtagacaagtgcgtgtcgagcttttcagcgtctaaaaacacctttttcgcttcctcaaaggtcttcgctgccttaaatgcctcgctgtaccgcttatattcctccactgccgccgcaatgtccggtcgggtgtacggaagttcactgaatttctgcacaacaatacgcttcctttccaaaatctatttgcgcttatcataccactgcttcgcacattttgcaagctgtttttgtttatcctgcacagcaaaatgtaatctatgcaaaaagagaccgcgcacaaagcccgatctctatctttgagataaattttaagttatttcagctcgccaacaacctcacgaatggacttcgccagaatattgaggcccttttccagcgtatccatcggtaccttcagctccggcatgatctttacaactgaatcgcgacggcctacacgctccacgatgaggccattttcaaacgccttgtgaatgaccgccttcgcaacatcgccctcaaacgcgccgaaatccacgccccacagcaaaccgatgccgcgtgtcgtgatgcggctgtcaatcgtctcaatgttctccttgaggaacttctccacgaacggcgcacgctcacgaaccgcgtcttccacgtgctcgttcagcataaactccaggcccgctttcgctgcgaccaaagacagctgatagccgcggaatgtgccgttgtgctcgcccggcttccactggtcaagctccgggcgcagcagcgtcagcgcaaacggcatgccgtagccgccgatggacttcgagagcgtcacgatgtccggcgtgatgcctgctcgctcaaacgagaagaaccaaccggtacgggaagcacccacctgcacgtcatcgacaatcatcaaaatgtcgtacttgtcgcacagtgcg

SEQ ID NO: 1708 - DNA, 10297 bp, Unknown
  gut microbiota DNA sequence
acgttcccgccggtctgctcgaaaagcatataaatcggtatgatcaggagcatccacagaaaaaagacgccgagctttttgccgcgctccaccgtgcgagcatattcagcataggatttttgaaagtaaatgaagatttggaagacatgggtttttcctttatgtgatgatctgccgttttagggtggcgatgtcgtggcggagcttttggaggacgccggtcgcgcgcatagagaggtagtcctcgtccgtgaaaatgaagtggtcggagaggatgacgtctatgccggagagtgcgagctcgatctccttggttgtttggatgtcctgccgtgagggcgtgcagttgccgcttgggtggttgtgcgcgaggtaaacggcatcggcgtcgtacaaaaggcacagccgggcaatctggcggatatagatgggcacgccgtgcacggagccctcgttgacaatgcccatgtattttaaataccccttgctgtccaaaatgagcagcacgacgatctccgtttttctgccgaaaaatttgttctgcacggcggcaaaggcggttttggtatcgacaatacgggtgcgcgcctgatttttcgactccatataggcacggaacaagtccgggtaagcagcgagcgcacttgcaaggcgcgggccgacgccggggcactccgctaaaatctgcgcgggggtatcgaacacgtcgctgagttttccgtgtcgctccaaaagtgcggccgctgttgtttgtgcggggcagctcgggtccaaaaggtgcagcgcaaacgtcaaaatatcgagctccgtagggttagacgtggtattcagctttaaaaactccgcttcctcttccctttttcgtcttgcggccatggttttcattcctttcaaatgcttgaaaaagggcagcaccgcctatgggtgccgcccggttttcagcggtcgatataacgttcgataaagctgcgcacagcgctccaatagagctttggcgcgacggaggcggaaaggcagtggcctgcacccggcacggtaagcaactgcttgtcgcagtttgcggcttcgtaaaggcgatacaccatggcgcacggcacaagggcatccgcctcgccgtgaatgaacagcacgggaattttacagcgacgaatctgattaagcgcactcgcttcgcgaaaactatacccgaacttcactttggacgcaagcgacaccgccgggataaacacacccattgcgccgccgtacagatctttgacagcggctttggcctgatcccacacagaggtgtagccacagtcttcaatggcgagcttcacctgcggcggcagctgctcgcccgccgtcatcatgacggtggcagcgcccatggattcgccgtagagaaggatctgcgcgtctttgtcgcggcgaataatttcgtagatccagccgatgatatccttacggtccggccagcccatgccaatccagtcgccggcgctgtcaccgtgggcgcgggcgttcggcattaaaatgttaaatccgaggtcataaaacgacttgccgcggtggcgcatacactctgcgcggctgccgtagccgtggcagataatggcatagcggtgacctttgtgcgggatgaaccatgcagtgaggcgcatattttcggggttgcggtacgtgacgcgcttggcatatttcttgaaccatactgttgccgcacgggtttcttcatcgtccggcagcgggtctttgttcggcgggcggcggcgcagggtatcgtttaaaacggcgttggagacaaccgcggccgcacctgcagccaatgctgcggcgaatagtgcttttttacccataaacacgcactccttttggtttactttgtgtggacagcgatgacggtatcgatgtcatcgggcagttttacagtgttggaaacctgcacgaacacgacgtccgggtagttttcaacgatccagtttttaaggggctttatctcggtgccgtcggagatgagacggatagactcaacctcatcgagcgaaatgccctgcagcgggataccgccgatggagttttccataatgtgataatagagcgttttgccgcttctggtgatgcgaccgttttcgggcttcggcaggtcgcagccgccgcagccgtaaatggaatcggaattcttctgcatccacgcgccgattttttccagaatctcgacggactctgcggggatattgcctctggcatccgggccgacatttaagagcatattgccgtttttgctgacgcactcaacgagctttttgataatcatttcggcgggcttaaagttcttatcctttgcgcagtagccccagttgtcgttcatcgtgatgcaggcctcccaacagatattgcggccgcggctgtccttaaagccggtctgcgggatgatctgctccgggctgacatagtcgccgctgtactcaagcggttcgtccgttgcgatggagccgaagccactgccactgacctccagacggttatcgatgatgatgtccggctgcagggagcgcaccatacgcacgagttccgacgcacgccacgcttcgccggtgaggtcgtcgtaggaaaagtcgaaccacatcatatcgagcttgccatagtttgtgcagagctcgcgcacctgaccgtgcatgtaatcgaggtagttatcaaagttatagggcttatctttataggcaatgttgttgcgcatagggtgctggcggtcgccgtaggcggggtaatccgggtggtgccaatcgagcagcgaataataaagaccgaccttgatgccctccgcgcggaacgcgtcgagatactcacgcacgatgtctttgccgtaaggcgtgttcgtgactttccaatcggtaagagcggaatcgaacaggcagaagccgtcgtggtgctttgcggtgagcacggcgtacttcatgccggcctgctttgcaaggcgcgcccactttttcgggtcaaaatctttcggattaaactcgttgaaaaacgggatgtagtcctcctccggaatttcttccgtggagcgcacccactcgccgcgcgcagggatagcgtaaaggccccaatggatgaacatgccgaagcggtcgtgggtaaaccactgcatacgcttatcatatttttctctatcaaatttatacatacaaactccgtcctttcgcccgctatttcggggattcttactgtgattgtatcattttgcccggcttttgtaaatagatattcgcgcgaaaaaaggaaagaaaggcgcctcgcaaacagcacggtagatacgcgtgagcgcgacgccctatccccctgcaaattatagagcaaccccgttgccccttttaaatcgggcagcggcgttgttgtatgtaaaggagtatagctttatatttgtgtaaagctgtatagctgcacagatatgcaaaaacgctcgtccgctgataaactgggacgagcgttttgttcacttatttaagcggatttccgatcaatcagaagttgccgttggtgagatcctcgacgtagagggtcttcgggccgttgttggccggtgctgcgggctttgcagccggtgcagcttctgcggcaggtgcttcatccttatgcggattgtcgcgccactcaaagaactttgtagcaacagccgggaacagtgcgtaggagaggacatcctcttcgctctttgctctgtcgccgatctctgctctgtacttctcaagctccggctcgatgaggtcggcaggacggcaggtgatgaccttgtcatcgccgatgcacttcttgcggacttcctcgttcacctcacccggcagcttgccgtattcgccgcgcagcatgcccttgctctctttggtgaccatcttatagcgctcaccgacaagaacgttcataacagcctgcgtaccgacgatctggctggtcggggtaacgagcggcgggtaaccgaagtcagcacggacgcgcggcacttctgcgagcacatcatagtacttgtcttctgcgtttgcctgcttgagctgagagataaggttcgaaagcatgccgcccggaacctgatacagcagcgtgttggtatcgaccttaaggaccttcgggttaatgttcagcttatcggcaaccgtacggaagtgtgcggcaacctcgctgagcttctcaaggtcaaggccggtatcacggctggtgccctgcagtgtggcaacgagggactcggttgccggctgagaggtgccgtttgcgagcggggacagtgcgcagtccacgatgtcaacgcctgcctgtgcagccatcaggttgaccatgtcgcctgtaccggtggtgttgtgggtatgcagatggatcggcacgctgacgttttccttcagcttctttacgagcgaatatgcgtcgtacggaaggagcaggtttgccatatccttaatgcagatggtatctgcacccatcttttcaagctgcatagcgagctttacgaagtaatcctcgctgtgtacggggctctttgtatagctgatggcagcctctgccttgccgccatattccttgacgtacttcatagcggtctccatgttgcggggatcgttcagtgcgtcgaagatacggacgacatcgatgccgttttcgatggactttttgcagaactctgcaaccacgtcatcggcatagtgcttgtagccgaggaggttctggccgcgcaggagcatctgcagcggggtcttcggcattgcctttttgagcgttctgagacgctcccacgggtcttcgttcaggaaacgcatgcagacgtcgaacgttgcgccgccccagcactccagagaccagtaacccatgttgtccagcttttcgcaagccggaagcatatcctcgatacgcatgcgcgttgcggcctgagactggtgcgcgtcacgcaggatggtatcggtaattctaaggggattcttagccataataactgttacttcctttcctaagcgttatcaaacgccgaacagagccaggaacacaccggctgcaacagcagaaccgatgacgcctgcgacgttcggacccatagcgtgcatgagcaggaagttgcgcggattctctttctgaccgacgacctgcgatacacgagccgccataggaacggcggaaacaccggcggagccgatgagcggattgatcttatccttaaggaagacgttcatgagctttgcgagcagaacgccgcctgcggtgccgagaccgaatgcaacaacgccgaggacgagaatcttaagcgtctgcggattgaggaagtttgcagcggtagctgttgcaccgacagaggtgccgaggaagatcgtaacgatgttcatcagctcgttctgtgcggtcttgttcagacgctctgttacgccgctctcacggagaaggttgccgagcatgaggcagccgacaagggatgcagcggacggcagcatgagggaaacaaagatggtaaccacgatcgggaacagaatcttctcggtctttgtaacctgacggagctgcttcatctggatcatgcgctctttctttgtggtgagcgccttcatgatcggcggctgaataaccggaacgagcgccatgtaggaatatgcggcaacggcgatcgggccaaggagttcaggtgcgagcttggaggtgacgaagatggccgtagggccgtctgcaccgccgatgatgccgatggagccggcctgtgccggggtgaagccgagcaggacagcgccgacataggtgacaaagatgccgagctgtgcggcagcgccgagcagcaggctcttcgggtttgcaatcagcggaccgaagtctgtcatgcagccgacgccgatgaagatgagacacggataaacaccgagcttaacgccgagataaaggacgtcgagcagaccggcagcttccgtggaaccgtttgcgagcgggataccttctgcaaacatctcccaatgtacgtggccgccttcaaacagtgcggcatggtaaatgcctgcgccgggcaggtttgtcaaaagcataccgaatgcaatcggcagaaggagcagcggctcgaacttcttgacgatagcaaggtacagaagaacacaggaaacagcgagcataacgagctgcagcgggttttcgccgagctgcgcgaagcctgtgctattcagaaaattagttatcgcttccatgaataatttaacactccttatttcagtagtatgtgcgtaggcttaagtttaacttagccgacaacgcagaggagtgtgccgctctcaacggttgcgcccttctggacgttcacgctggtgaccttgccggccttcggtgccatgatctcgttttccatcttcatagcttcgaggatcatgagaacctggccttcagcaacggtatcgcctacgttgacgttgacggaaaggatgttgccgggcatcgggctcttgacctgctcgccggcgcctgccggtgctgcgaccggggccggagcgggtgctgccgccggagctgccgcaaccggagccggtgctgcgccgccgacgacttcttctactgttacttcataagctgtgccgttaacattgacattatactttttcattgaacttacctctcatctgttagatttcgcgctttgcgcatttcagactcttttaatggaatggatgcggatgtgcgaaacgtccgtgcccatctcctcggcgatcgcgactgcgatagcggcaacgatctgctggttgttttgggcggataccgccggatcgggtgctgcagcaggtgctgcggcggccggggctgctgccggagccggctgctttttagcgaccttctccatgatgaggccgaggatcttgatgataacgatcaagcagatcaggaccacgaacacggtaataaggcccatcagaacaacctgaacggtgctgatgttggtctccataatcttacctcctttcaccgaagcgttatggaaataaaaatagaaaatgtaatttgcattctgaaaaaaacaccacattcccgcattttatcagaatggttatatcttaacacggaattcaaaatttcgcaatgcttaattcaacttttttaaccgatattttcggaacgaaagtctgtttagagtacattctcgtttgaacgccgaaaatcagcaaaaacacgccgcttctttccggctcaaaacattgacgaaaaactttcttttatcccgttgcattttagtagaaaacatagtaaaattgtattatctgttatttagcatgggctttcttcccaaaaaagcgaatagactgcccaaagtattgaaatgaggcgaagacgtgttttcaaacaaagatctgcggaagctcatcataccccttgttattgagcagcttctggccgtaaccatcggtatggcggataccgtaatggtctcctcctgcggcgaagcggcggtttccggcatctcccttgtggactccatcaactttttgctcatcacgctgttttcttctttggcgacgggcggcgcggtcattgcgtcccagtacatcgggcgcggcgaccacaaaagcgcaagtcttgcggcaaagcagcttttctacgccagccttgcgctttcggccgtgctgggcgtcatcgccgtattcttccgcaagccggtgctgaacatggttttcggctccattgaagcggacgttatggcgcacgcgcagatctattttttgctttccgcaatctcctatccgttccttgcggtctataacgccggtgcggcgctgttccgctctatgggcgattcgcgcacgacgatgctcatttccattttaatgaacaccatcaacatcgtgggcaatgcgattttaatctacggcttccagatggctgcggcgggcgcggcgacggcttctcttgtttcccgtgcagtaggcgccatcatcattacggtgctgcttttgaacccgcgccgtattattttctatgataagctccataagccggaaatccacctctccatgttgaagagcattttgcagatcggcgtgccgaacggccttgagaacagcattttccagatcggcaaaattctggttgcaagcattgtttcgggcttcggcaccatttccatcacagcgaacgccgtggcgggcaacctcgcttccttgcaggttattccgggcatggcgctcggcatggcgatgatcacggtcgtcggccagtgcatcggcgcaaaggactacgaagctgtgaagaagtacacgaagaagctgatgctcatcacctacggtgtcgtctggactatgacgcttttgatgctgctgttcagcaagcagatcctttcgttctactcactctccgaggaaacgaccacaatgacgatggaggtcttcattgtgcacggcatctgcgccgtcattgtttggccgctggcctttgccctgccgaacgccctgcgcgctgcgaacgatgtgcgcttcacgatgattgtttccctgctttccatgtggatcttccgcatcggcttcagctacattctggcgatctactttaacatgggcattttgggcacatggattgcaatgtgtatcgattggttctgccgcggcgcctgctttgtcatccgctttgcgcgcggaaaatggaagaatatcagctttattgataactaagaaggaggtaaaaccgtatggaatatgatgcttttaccggcggcgttgcgccgggcggactgcgctcgaaaagcgatatccgcattttgatctgctatatgctcaaaagcgtgaacgcaccgctttcgggcgatgacatcatcaaggtcttgcaggaaaaatcccttgcgaattactttgaggcgagcgatgcgctttctgcccttgtgagccttggcaatgtcacccgtgaggaggacaacacctatgtgctgactaagcgcggcaagagtgtggcggacgacttagaacagcttatcccctcttccgtgcgtgataaggccgtagccgccgccacggctctgctggcttccgccaagatggagcgcgaaaacgtggcgaccattgtccgcaccgaaaatggctacaacgtgacatgccacatttccggcggagaaatggagctgatgagccttaccgtgtatgtgcccgacctctatcaggcacgcgaagtgaaaaagaactttcaccgcgacccacagcgcgtgtataacctgatgctcgcggcgcttaccggcgacgacgagatgatgaaaagcgccgtaaaaccgtgagtttccgtcacctttaaaattccgaagagccgcagtttttgcggcttttctttttcttcacttcctgtttttccgaacattctgcacttgtcgtcaaaaaccgacatttttctgtatgtgtattgtgtatacttgtatgtgaaaacagtttgagttttcacagaatatacacaccattcgcgtgaatgtttttcacgtagtcgtgcatagtggcgcaaatagcgtatactatcattgtatctgttatttgtatctcacgcaaaagatacaacacagttatgtgcacgattttcacagaatgacacagcggatggtgaacagcaatggaagaaatagaatctaaagcaatcttcggccgacgtctcaagcgtttccgtgaagaaagcggctacacgcagtcgatccttgcgaatattcttggcgttgaacgttccacctacacgtattatgaaaccggtaaaacgacgcccgccatctttgacctgatgcgcctttgccgtctttaccgcatttctttggatgagctgtgcggatacagcgcaaactctgcagacgcgatgcgtctgagcgattccggtcagcgcgtgaaagtgtatgcacgccgcaaagagcgtcgttaccttgccgattctgtgctggatctttctacagatgagcagcagcttttggcgtattatcgttccgcttccccggaagaccgtgcggagctttttgaacatctgcgcaatgcacggtaccgtaatcgccgccacgcaaacgcaaaataaccttcaaaaatttcatatgcgcttgtagcccagttggatagagcgacagactccgactctgtaggccgctggttcgaatccagtcaagcgcgccaatgattgggtgacaaaaaaatgtcacccaatttttcttagtattcatgcggtttttcgggcttttggggacaaaatccggcaaacgttttaccgtagatatccaaacagtaaaccgcagctgaatccgccgcagcgtggcttccgcctgatttttcaggttggaagccacgcttttttacgtttttcaaccttttttcccgtt

SEQ ID NO: 1709 - DNA, 2708 bp, Unknown
  gut microbiota DNA sequence
ccatatcattttagcatggacaggaagttcgttttgggacattttttgttttgaagcaaacggtttcacacacgatacaaattccgcagaggaatttcggcaatgttttctcttgaaaaatgcgatgattttcggtatgattatatagagttgttcgtacaagtgatacgagtgacggaatgagaaaatcacacaaacggcgggtttgccgtgaaaggacgggtatatatggaacgcaacgagactgccgcgctgatccgcgggggcgaagcggtattcggtttggagcttggctctacgcgcattaaggcggtgctcatcgggccgcacggcgaggtgctggcttccggcagctatgactgggaaaaccgcttggagcaaggtgtgtggacgtaccacatggacgacgtttggcacggcattcaggagagctacaagaaccttgcggcatcggtagaggagaaatacggcgagaaaatcacgcatttgaaggcgctcgggttttccgcgatgatgcacggctatttggcgtttgaccgcgagggcgagctgcttgtgccgttccgcacatggcgcaataccatgacggaggaggctgccgccgaccttacgtcgcgctttggctttaacattccgcaacgctggagcattgcgcatctgcatcaggcgattttaaacaacgagccgcatgtgaaggacattgcgttcatcacgacgcttgcgggctatgtgcactggaagctgacgggtgagaaggtgctcggcatcggcgatgcctccggcatgttccccattgacagcgagcacaacgtgtacgattccggcatgatggacacgtttgatattctgcacaaggagcacaacctgccgtggcggctgcgcgacattctgccgcagattcgccttgcgggcgaggacgcgggcgagctgaccgacgcgggtgcgcttttgcttgaccccaccggcaccttaaagcccggtgcgccgttgtgcccgccggaaggtgacgccggcacgggcatgacggcaacgaacagcgtccgtgtgcgcacgggcaatatttccgcaggcacgtctgtttttgcgatgatcgtgctcgaaaaggcactttctaaagtacacacggagatcgacatggtgacgacgccgaccggcaagcccgttgcgatggtgcattgcaacaactgcacgtccgacatcaacgcgtgggcggggctgtttaagtcgtttgcggagctcatcggcgcgaagtgctccatgccgcaggcgcttgatacgatgttctttgaggctttaaagggcgacgccgattgcggcgggcttgtttcgtgcaactacttctccggcgagccgatcaccggcatggaggagggcagaccgctgtttatgcgtctgccggacagcgcgtttacgttccagaactttgcgcgcacgcagctttactccgcaatggcgacattgaaaatcggcatggatattctgatcgaaaaggagcatgcggaggttgattcgctgcttggccacggcgggttcttcaaggcgaagggcgtgggtcaaaagctgatggcaggtgcgctgcatacgccggtctccgtgatggaaacggcgggcgagggcggcccgtggggcatggcgctgctggcttcttaccttgtgaacgcagaggacggcgaaacgctggaggattacctcgataagaacatttttgccgaggcaaagagcgagaccgcagagcccgatgaagccgacatgcagggctttgagaagttcctggagcgctataaggcaacactgccggtggagaaatccgcagtggaaacgctgaaataaaacagaaacggggagccgcgcaaggtacatgcacggctccccgtttcattctatattattctgcgtcaaaggacggtaggcttattcgatctcaatgtggcgcgcgctgtccggcagggccttcttcggcatttcaagcttcaaaacgccgttgtcgtaggttgccttcatgtggtcggcgtctacgctgctcaggtcaaactgacggctgtacgagccaaaggagcgctcgcagcggacgtagttgttcttgtcgtccttttcttcctgctctgccttgcgctcggcgtgaatggtcagcgtgtcgccgttgacatcgagatggatgtctttcttgtcaaagcccggcaggtcggcctccagcgtgtagctgtcgccgttatccttgatgtcggtcttgaacgatgcgagcgcgctgtggtcgaaccagctgccaaacggatcgttaaagaaattacgctcaaacgcgtccatttcacggaacgggttgtaagcactcaggttgtttcttctatcattattgttacgatacggtctcatgtcaaacataagtcattctcctctttgttgtgatgttttcgtcttaaaagctgcatgttttcacttttatcgtgttcactttatgttccaagggaaccacctctttgcattcatcttttcttttcgattatcagtatagtggtacttttcgttttttgtgttatgcgttttttacgaaattgttaaacctgcacttttttcttttgaaaaaacactgcacggaaaatgacgctgtgccatattgaaaaaaacgggtgtagccccgcaaaaaggggagcgggagttgatagaacttttgaacagaaaaagtgattaaagttcacaatgtgcagcacaag

SEQ ID NO: 1710 - DNA, 2281 bp, Unknown
  gut microbiota DNA sequence
ctcggcaacagccacagcaggcgcagcgttcagctcaacggtgtaattggccgcctctgcaccgacaggataaacggtgctgtccagaagatagccctcggagggtctgatctcacgaatcgtccagtcgtcgccgcagacataatagccagtggtgaactggccgttctcgtcggtgtagtaggtatccacaagctgatcgcccttataaatgccgtaggcggcaccggcaagcgaagcgtcgccctgcgccgttccgacctcacagtcactcttagtgacggtgacattgaatttcttgaggatgttggaaaagctcttattggttacactgttccattccactgcggcactctggctgttgggaaccacatagcgaatggcggtgtccatctcctccagtgtgtagccggtgccgatgagcacatcccggaaagtcgccacaccgttttcatcggtgacggcgtattcatctacagaaaggccgctaagggaggttccaaaaaggtggaacttcacgccctgattcagcccatcctcggaggtcttggtcacggtcagatcgccgcgacggagcacattgttaaaggaaaccgtcgccgtctgtccggcaagcacggtaacacggtggctttcctggggctcgtatttgtcatagctctgctcggtgacggtataggtgccgggcatcagattgttgatgcgaatttcaccgttccggtcggtggtaacggtctgattgacgccctcgccggtgatggtgaaggtaatgccatccaccttgccgtcctcgctggtcttgatgattttagcgccgccgtagctgaccttcagattcagaaaggctgtgaccgggtcgctgaccgtagcactgtaggtgaccacatcctgcatggtgccgtccgggccgtagtggccatcgctccacaccacaacacccttacgcagagcctccttttcggcagtgacttgaagcgtgccgacaggggcgttctgagtcgagatcgtcagcacatttccctgaacagagaaggaaacgcccgtctggttagcagagaaacggtaattgcccaggacgccgttggtatcggtcagcgtggccgaatagctgcttccgtcccagttcagctcgacggtctgtgcttttccggtacttttggccatgaagctcgggacaatggtatgcttctgcacgctgtcctcaatgctgtcataataagcggaaaagcgactgtacaacgggtggctggtgcggtaaacggatttcactgcatcggcgctgccggggtcaacatggttaaagtttgcatcccgttctccgacgaccgtttcccacaccaacgcctgggtggccatcatgtgggccagtttgtcggcatccgcatcattctgcgatctccataaggtggaaagattgccctgataaccgtactgcatgatccgtcccagcagggtcttgatggtgtcagcgtcgatggtgctgttgcagtcggatgggtagttcttccaataatcctcgccatggcgggaatatgtcttgcccagcagacgaggcacacccggctcaatgcagtagcaggcctgtccatcgaaggagccgatggtgtgcagcgtggtcatccaggttgcctcgccggaggtccagccgttcatgtagtgaagctcatcatggccccatgtgccgctgtagtccagattggcgtccccgtctctggggaaccctacggaataggactcagcggtttctccggcagtcgaggcagcaaaggccgtagtcgtgccgatgctcatgagtgcggtgaatgtcatcagaaccgcaagaagtcccgacattccccgtctgaaaatgttctttttcatgttggtttcattcctcctgaaattgaattttggtatgaaaaaagcgccgtatttctacgacgcttctcaaagtgatataaagttttatgcgtacccgatgtagatcagatacttgtctgtgccgacgcattcgtaccagatccagacatctgtgatgctcttgtcctcggcatatcgcttcaaacgcgagttaatgtctcgctccagatagatgcagccctgctctgcggaaatcggattgtcccagcaatcggttgccgagctatccaaggtcagtcccaagctcaccgccgtgctttttgcgtaggaaatccagtgctcgatatcaaatgcgggttcagtttccggagtcggttccggctcggttatcgcaggaacggacggttcctctttcggactttctgctttctccggcttctcc

SEQ ID NO: 1711 - DNA, 568 bp, Unknown
  gut microbiota DNA sequence
cagaagaaaagctcgggctgctatcgtgcttgtcctcatttggtatgcaagctgctggatcggcggcttctgtcggggctttggtgtgagcgcttgaatctgtggataccggctcaaaggaagcaggcgtttcttcctgtggcattggagctttcgatgtgtttcctgccgtttggccttgcgagggctctgcggcgcatccggaaagcaatgcggcaagcaggagtgcgcacaatataagaagctttttcatgggatgacctccaatgactgtttttctcatattgtacggatgcgctttgttttcttcaattgtgccgcctgtatattttccttttgagctggtattgccggtaaatgaaggggagagtgtgagagggggaacggcgctgacgcagcgtcaaaagggtagactgcccccttggcgaagaacctatcttgcgtcattccgacttttctgccgctcctgataccggtgataatattccagcgctttcagaatatactcaccggttttttcgtagggaatgctggcagggataaaccttctggcctctgcgtacttgat

SEQ ID NO: 1712 - DNA, 1893 bp, Unknown
  gut microbiota DNA sequence
cgggcgagctgcccagagaatgcgaatttatggggcgtctgtccgaaaagctccataaggatccggcctttggaaaagtgctttgggaaatcgggcacgacttaggcttctcccagccccaataaaacgcatacggcggcaggtgatatacctgccgccgctgcttatttctccatccattttttgatggccttgttggtattgtgccgctgcacggcgcccactgccgcagcgatgttggcgtcccgccgggctttctccgcaatggagttctgccgatccagcaggtcgttctgctccatggccagggcgttggcctgctgctgctcctgcaggcgcatttcctccagcgcccgctgctggctcttgtcgaagtattcaatcgcctggcgcacatcgtagtccgaggtggagatcatgtcatagatgtactgcagggcgtccacccgccggtactgggccggaacaatgcgggtctccccgtagagcgccgccagttccttctttgcttgggccaactcctgctcctcttttctgatttgcgcctgatgctccgcttcccatgcgctgcgggcggcctgataccggggcaggagcacggagtcatattcctccttcgccttggtgtacgcctcgtcaaaatccagctgctgccggtttgtggccatacgggcggccgtgcactgctgttggtattcggcggaattgcggattctctcgatggttgccgccttttgcttgcggtaaagagcgaagtaatacacaggcacccagacaaacagcgtcagtgcaaacatccagacgagaaaagcgctgttgctgaaggcggagagggccagcgtgatcccggcaggccccagcatcagcagccagttgaccttgcagccgtgccggataggcggctcggtgtaatgggcctcctgccgcaccggcggctggggctccggttcggcgtaggtctccgcccgctcctccggcagaaactgctccagcacctggatctgcgtttccagctccagcgcctgcttgacgacttccacttgcttttcgtgttccatagtgttttctccttttcgtttgatatggacaggatagtgcactctgtgcgactttttcgccctacggccagtaccgccgaagcagacgttccatattttcccgccccaccgggttcattgtgtgaatacggacaggaagaaattgcctggtttctgccagccagtccaaaagtttgatcccatcgccgccatcgcaggcgtagtcgcccagatcgtggtcgcaatccaccagcgtgatgggttcgatcgcacggtggatcaggcgttttgcctcgttgacactccggcaccatacaaagccctccggcgccgggcgcatgtcatccagccagattttcatggctcctcccgggacgattcatttttgggaagaatgccaatatctgcgagtgcttccttgttataacagttccgaagccatgcgatgctgttctccaacattgcttgctgctgcgccaggcagtaggtgttcagcaaatattcaatgttgcggtcgcccttgagaaagtcgctgatgggcttgagcagcttgtgaatgcccttcagcggcccccggtagtattccagatccaaataattgtggagaagatgatcgtgaaacacaaacggtatagtctctcccgggtcgcccgacatggtgtatcctccactgcaggtcatgtcgctgacatcgcctttggcacgcattcttgccagtgtgcggtccaggttgctgagccatttctctgagtatcccgaaacgggcagctcccgctgaagggtttcagcgttccaggtgcagaggtcggtcagcacaaagggctcgtcgggccatctgtgagaacacacgatgtcc

SEQ ID NO: 1713 - DNA, 2357 bp, Unknown
  gut microbiota DNA sequence
cccgcgatatctgccaaatatcgtgggattttttctactcccgcccccacctgtcgcttttccgctcaccttacctattcttcaaatttagcatatttacattgtacttttcccgtgctatgatggtcttaacaaagacgaaaaggtgattttatggcgaaaaagctggcacatataagtgaagatcattcccgcgagcaaaccgtatacgaacacctcaccggcacggcagagcttgcaaagcagtttgccgccgcattcggcgcggaggaagacggctatctgctcggtttactgcacgacatcggcaagtacagcgatgcctttcagcatcgattagacggcggcgtgcgcgtagaccactccacggccggcgcaaaagaagcttgcgcgcacggtgtcgggtatctggcgctcgccatcgcaggccatcacggcggcataccgaatttcggctcccgcgccgatacccaaaacgacgctaccctctcgggccgcttaaaacgcgacctcgaaccgtatgacgattggaaaaccgaagtcactctgccgccggtcaagccctttaacatgcgagaattcaacaccgggtttcagctctcgttttatatccgcatgctgttttcttgccttgttgatgccgatttcatcgacaccgaaacctttatggacggcgcacttgccccgcgcggcaactacgatgcgctccctgcgctgctcgaccgcttggaaacgtacatcgcaccgtggtatccgcccaaaaccgagctcaaccgaaagcgctgcgccattttggatgcgtgcaaagcctccggcagcaccgccaaaccgggtgtttatacgcttaccgtgccgacgggtggcggaaaaacgaccgctgccatggcatttgcgctgatctctgccgtgcaaaactgcatgagccgcgtcatctacgccgcgccgtacacgtccatcatcgaccaaaacgccgatacgtttgaaaaaatcttcggcacggaaaacgtcattgagcaccacagcagcgcggaatatctcttttccgaaagcccgaaccccgcagagtaccgcaaaatgctggccgcagaaaactgggacgcccccgtcatcgccacgaccaccgtgcagctgtttgagtccctgtttgcgagcaaacccgcccgctgccgcaagctgcacaacctcgccaacagcgtgctcatcttagacgaagtgcagacgctacccatgccgtatctaaagccgttcacggcggcgcttgccgagctttcccgaaagtacagcgtcatcgtcgtcctgtgcaccgccacgcagcccgcgttagacggtgtttttgccgatttgaaaatcgacctgccgatcaacgagatctgtcccaatgtctctgaaaatttcgagaccttccgccgcacgaaaatcgcgcagcacacatttgacagcacagaatcgctcaccgccgagctcatcgcgctgccgcaggtgctttgcatcgtcaaccgcatcgcggacgcacagaaaatctatcaagcactgccaaaagacggcgcgtactgcctcaccacacatctgtgccccgcccaccgcaaagcgcgcattaaggaaattcgcgaacgcctaaaaatcggcctgccctgccgcgtcgtttccacctcgctcatcgaagccggtgttgatgtggatttcccgcgcgtttaccgcgaagaagccgggcttgattccgtcctgcaagccgccggccgctgcaatcgcgagggcaagcgcccgttagatgaaagcctcgtgaccgtcttcaccgtccaaaacaccactccgccgccctacatgcgccagcccgccgcagccatgaagaacattgcaaaacgcatggaggacatcacttcgttagctgcaatccgcgcgtattttgagttctatcgcgatttgtacggcaaagaagatctcgaccgtgagaagattctcaaggcgttcgaaaacgagatgctcccgttcgcctccgttgcggaaaaggtacgggtcattgaaagctgcaccacacccgtgtatatcccgatcgaccaaggcgaagccctcgtcgagcggctgtatcgcggcgaacgcagccgcaccctgttcagaaagctcgggcagtacagcgtgaacgtctacccgcagcagctcgctgccctgcgcgaagccggcgccgtgcagagcatcgacggcggcgcgctctatgttctcgccgatccccgccgctatgacagtgccctcggcctcaccctcgaccaaaccgaaaccgctctgtttatataaaatagaaaagccggtaaggcaacccttaccgacctctctatacaaataaaacgtagttgtttctaccc

SEQ ID NO: 1714 - DNA, 14554 bp, Unknown
  gut microbiota DNA sequence
tgattccgatcggcgttttgcagggctctacgagcgaggtgtgcgagatccactcgatgtcgatggagtttttcacctatccgtggatggataaattcttcggcgaccgcgcggacgaataccgttatgcacatttgtgcgacgcactggccgttatcccgtacatggcgtgcgtggatgagttccagcacgaggtatacaagaacccgaagatgacggcgaaggaacgccgcggtgtgtggcgcagcattgagaaaaaatatatgccgtggcgcgattatgacggcaacgcattcttggaaaacggtggtttttggatgcagaagcagcacattttcctctacccgttctattatatcgattacgcgctggcgcagatctgcacattcttcttctatgacgagatgaagaaagaccgcgagagcgcttgggcacgttatttgaagctgtgcaaagcgggtggcacgctgggctattttgatctgctgcattatgtcggcattccggtgccgtttgaagatggcgcggtggagaaagccgtgcgcggcgtgattgaagagattgaatccgcgaagtattaaaataaattataaaagccgaacggcggggaaagctccgatgccgttcggctttttgcttgcgtgctaattttgtttgttttgcggattgagctttttcttcatgcggatatctttgccgcggaagatcaagcggtcgtagaatccgattatgcgcgaagtgaagcgctcgttgtaacgcttttcaagctcctgcatggagaggtttgtgctgatgatagtcggctttttcagcgtgatgcgtgtatcaatcacattgtagattgttgccgtgatgtaagacgacgagatttccatgccgaggtcgtcgatgatgagcaggtcgcagtcgtttaaaagatcgagcgtatcgccaccggattcttcggtgcgggtgaagcgctcgcgctcgagagaaagggcaaaagtctgcgccgtgccatacactacgccgaaccccttattgatggcttctgcggcgatggcgagggaaaggtgtgttttgccgagacccgtagcgcctgtgaaaaacaggttgccgctatcctttttgaagttgtctgcgtagcgccggcagaagtcgtaaatgttgcgcatttgctcgcggtcggaacgctcgccgtttacggaaacatcggaataatagagcagggagaaatcctcaaaggacgagagcgtcagcggggagatacggtttaggttttcgtaggcgatctgctttaataaactgcggtaacaggagcaaatgcggccgtctacatagccggtatcttcgcagcgcttgcaggtgtactgcggctcgatgtcagcgcgggtgagaccgtgcgcggcgaggagatcggcaaactgcttttgcagcgaaagattttcattttttaaagcttccatggtttcgcgcgcgttgccgctgcgcaaaacggccatagccgcccgacttgctgtggaagcgatgcgtctgcgcacgtcctccgcttcggggcagacggcgtagaagttctctaagcggcgctgtgcgttatcctgcgcagtggtgcgacgcctgtttaattcattttcagcttgcgtgtagacctgccttgcatatcccatggtttatttctccgtagcaaaaatatcgtatttttcgtattcgtcaaggtcataagaaggcttatgcgcaccctcgcggcgggcttcggcggcaattctttcatccacggcttctttcaaggtatggatgcccgcgttgtgccacgattccaaaatggcgttgatgtatttcatgttgaccttgccggtgttatccacacagcggttataggcttcgtttagaagctcatcgggcatgcgccactcgaacacccatctgtgagcaaactggctctcgtttttgctgggggcgcggcgggaggtgatgccgaatgcattttcacagcgcttccacgcgatggcggtctcgtcgagctcgcgcagcttttcctccgcggcggcgatgcttaaaatgttggaatctgcccagttgcgcacggtggattcgatgtagctcgtgtttgcgcgaccaatcttattcgcgtaggcgataagcattaaaatgacttcgcacggcaggccgtaatcttcgtgcgcctgaatgagcgtgccggaaagcgcgggggaaagcgttttgccgagcagattctgcgcttcctctacaaggcggcgaatctccggggaggactctacgcgttccgagatataaagcccgtccgggcgcagcatacgcttcggcgcggtggggcgctgcggctgtgttggagcggcctttggctgcggtgcgacgggcgtggggctctccacgcgattcggcgtaagggtggtatcaagcggggtgtcaacgctgcaaatgaggccgcttttcatccagaagccgagcgcggtatcgacacgctgcggggtgatgccgagcgcggctgcaagatcctccgccgcatacggccgcccgttatggcgcagaagccacagcatgaccttgagctgatctccgtccgcctccttgatatatcgatctacaagcgcgttcggcacggcgaaaaccgcgctccatgcgccgagctccagcttataacccatgaaaagccgccctttcccatcttgaatttctgcatgtatcattgtaccacacattgcgcgtggttacaaccgtaaaccgcccggcgtaggcggattttgtccgcgcgaaatttttttaaaagaaaattcgcgataggggttgactttacggagaaaattcggtataataatcaacgttgcaaaacccaatatgctgatgtggctcaatggcagagcagttcactcgtaatgaacaggttgtcagttcgattctgaccatcagctccagaaacccgatacaatttgtatcgggttttttgttatctgcaaagccttgcgcggaggcgttttttgtggtattcttgaaaaaaaggagtgtgatccatgcgcagcgatgaatttatcgatttatataaacagctggaggatgagcttgaggtaaagttcagcaccgcaaagcaacggcggtattccagcgtggtttttgaatacatcaaccattatgaaagcgcgcctgtgcgcgagacgttgaatctctgccgggaaatccgcaatttgatgacgcacaatgcgaacctcggcggcgagccgatcgtggagccgagcgagccggtggtggaagcactgcgggaggcgctcgactacgtttgccgtccgccgcttgcactcgactttgcgacaaaaggcagcagcattcgctgtgcaaggctttcttcgcgcgttttaaatttgatggaaagcatggacaagagcggcttttcgcacattccggttatagaaaaagagaaatttctcggtgtattcagcgtgtccacaatcttttcgtgcattttgcgtgacccaaccttgcgcatcacgaaggaaacgacgctttcacagcttggaaaaatgctggccgtagaaaagcatgtggaaaattttgcgtttgtcgacgagaaaacgacctgcattgaggcacggcgtatgtttgagaagatacgcggtcgcaacaaacgcctttcggtcattttcatcacgaagacggggagccgagatgagccgctgctcggtatgctgacgccatgggacgtaatgcaggatattcggcacacagatgaagacccggaaagcccgcgtaaaaagaacaatagagacgctaagaactgaattcactccatacgaaaacgacaccgcacgggaaaagacttcatcatgcggtgccgttttgttttatgttttagttgtcggaggggaagcggatgttcgcgagcttgcggatttcttccatatagacggaaacgtcgtaagcgagggcggagcactgctcgtattccgcgcgggaaacttcgggttctgtgatataacggtaaaaatccttcgcttcgtagcccatcagcttgaatttttcttcttcgccgcaaacttcctccacggtgccgttgttataacggatggagatattggcgagttttgagatggactccacggatacagtgccatttgtgccctgaaaatccgtgttcgcgccggcctgaccgaccttggagaacacgaggtttacgagcttatccgggtactgcatggcaacaatgtcgctgccgtctgcgccggacgccaataaatgcgacacggcgagcgtgttctgcggcttaccgaacagatacagcgcgggatagacgcaataaacgccaagatccatcaaagcgccggtctcgagcgcggggttaaagatattcggcaggctgcccgcaaggtacgcatcgtactttgaagagcgctggcagaaatcaatcttcgccacggagatatcgccgatcttttttaaagcttcttccaaaagctctctctgcggcaggtgcatgaacatgatggcttcaaggtagatgagcccgcgctcttttgcaagcgcctgcaactctgctacatcttttgcgtgggcggaaagcggcttttcgcaaatgacgtgcttgccgtgctccagaaaaacacgtgcctgctcgatatgcagtttgttcgggcttgcgatatacaccgcgtcgattttgtccgttgcggccatttcttcgaggtcggtaaagacagtttcaacgccgtaaggcgcagcaaaagccagacctttttcttttgtgcgggagtaaacagcggtgagttgccacaggccgctgtccaaagcgccgtctacgtagctgttcgcaatccagccggtgccgatcgttccaaatcgcagcatagttttaggttccttttccattattcaacgagctctgcgatggacttgacgatctcgacgatggtctccatctcttccagaacggcaaattcgtttctgccatgtgcaagctctccgccggtgcagaggttcgggcagggcagacccataaaggacaggcgtgcgccgtctgtgccgccgcgaatgggggtggtgaccggctctacgccgtttttgcgcatggcggcgcgggcaacgtcgaggatttcctgatgcggcaggatcatttctttcatgttggagtatgcgtccttcagtgtgaccttgacgagctctaagccgtacttgcggttgatgaactcggccgcgaggttaaatttatcctttctcgcttccagaaggtcgcggtcgtggtcgcggatgatgtagtgcaggtgagcgtgctctacgtcgccctccatgttgttgagatgcgcaaagccttcgtagccctcggtgttttccggcacttcccggctcggcagcagggaagcgaactccatggcgacgcggcttgcgttgatcatcttgttctttgcgctgcccggatgcacgcttctgccggtaatctccacatcggcggaggtgccgttgaagttttcataatcgaggccgccaagttcgccgccgtcgagcgtgtaggcgaaatcgcagccgaagcccttgacgtcgaacttatccgggcctgcgccgatttcctcgtccggggtaaatgcgatatggatttcgccgtgggggaggttgtttttgatgatgtcttccgcagcctgcatgatctcggctacgcctgccttgtcgtctgcgccgagcaaggtggtaccgtcggtaacgataagcgttttacccttgaattttttgagaatctggaaattttcaacgtcggtgacgatgccgagctctttgttgaggacaatgtcttcgccgtcgtaattttcaatgacgcgggctttgacgtttgcgccggagacttcttctgcggtatccatgtgcgcgatgaagccgacgacgttcttcttttcgcagtttgcgggaatggtgccgtaaacataaccccactcgtccatgtgtgcgtcttcaatgcccatggcgaccatttcatcggcaaggtgctgtgcgagcagcttttgcttcatggtggagggcatggtggtgctggaggaatcggactgggtgtcgtagcttacgtaatccagaaatttttctttaacggacattttcaatcactccttaagttcttgtgcagctatgcaggacacagatgcgcaaaattcattttcattgtacacctttctgagttgtattgcaagcgggggaacaaaaaagctctgttttctcttgtccgtgctaaaatgatatgattcgaaaaagaagagaagttaatgtcaaagtggtataacatgtgatacgacatctctcgttaggagcataagaaaaggctccgtgccgaaaagacacgaagcccaaactttaaatcaggtttttggatatgaggggaatcagacctcagcccaatacttcttgaggtttgcaaggccgatgcgcagtgcatcaaagaccggctccatgccctcaaactcgatggagatgcagtcgtcatagcctgcacgcttcagctgatacatgcactgcttgatcggtacattgccgtggccgacaatagtgccgcgcaggtacttgccgccgcgggaacggaagctgccttcgcccggatcggcatccgtgaacggctttacgatgaagtcctttgcatggacatagtacgcatacggcgcaactcttgcaaatgcggaagccgggtcctcatctgcgcagaggaagttgcccatatcggtgaggagaccgaagtttttgttgtcgaccgctgcgtagagcttctcgacacgctcggaatcctgcacatagaagccgtggttttcgaccatggtgcggatgccgaactgtgcagcgtactccgtgatttccttgcaggcctttgtgaggcgcgggagcatcgtatcaaacgggcagaagtcaccggagttgcgtgcatagccaatggctgcgtcgtggcgcatacgggtgacaccgaggacgtgtgcgatgtcgacgtaatcctttacgcgagcaatctctttatcgaggtcgccgtcgctgccggtgatgaagtcgcagctcataacgagtgcggaaatctcaaggccgacgcgctcgcattccttgcggagctcttcggcgtgggcgagacgctcttccttggtgccggtgccgaaatcggtaaaatcgacaaactcaatggcatcaaagccgagttccttggttttcgcgatcagctcaaacggagtagcctcgccggagcggatcttttgcatgtagctgtacatactgacggaaaatttcatgtgggtcagtcctttcaatacaatcctttttattaaaacgtctcttttgacgttttgtgcgaatttagtcgccgaaggaaatgccgatctcacgggcagcgaggatttcttcgcaatcgaccgggacggttttcagcttgcctgcgacctcgctgagcggcaccgggacgatcttgccgttgacaaggccgaccatgttgccgtagttcttctcgcggatgagacttgcggctgccgcgccaaagcgtgtggagagcacgcggtcgtaggcgcacggactgccgccgcgctggaagtgacccggtacgcagacacggatctcgttatccacacgggaggcaagctcgtctgcaaggcggtacacgatggacgggtacttcatttcggcacgcgcctttttgaagtccttctttttcatggcggcttcttccttggacagcgcaccctcggctacggcgagaatggagaacttcttgccgtttgcgattctattatccaatgtttttgcgattttgtcaatatcatacgggatctccggcagcaaaatcacatctgcgccgcccgcgatgccggcataaagcggcagccagccgaccttgtgacccatgatctccacgcagaaaatgcggccgtgggaggtggcggtggtgtgaatgcagtcaaggacattcgtcgcaatctccacggagctgtggaagccaaacgtcatatcggtgccccagacgtcgttgtcgatggtcttcggcagggagacgacattgaggccttcctcgcgcagaaggtttgcggttttctgtgtgccgttgccaccgaggatgacgaggcagtcaagcttcatcttcttgtagttatccttcatgttcttgactttatcgacgctgttttcatcgatgacgcgcatgagcttgaacggctggcgggaggtgcccaaaatggtaccgccgagcgttaagatgccggagaaatcttccggtttcatcagcttgtattcgccgaaaataagacctttatagccgtctttgatgccgtaaatctctacgtcgttgccgaattcttcgtaaagcgactttgcaacgccgcgaatggaggcgttgaggccctgacagtcgccgccgcttgttaaaataccgattcttttcatcgttcctcaacctttcgttgtggtgtgcggacagcaaaacgcgccgaagtccgctcaatttattctattataatcttttatttacaactatgcaagctttattcttccgcggagtggatcgggatcaaaacgctgtccttttcgatggactgcagctctttcagacgcgcctgtgcttcatggtagaatgtaagctgcgagctgatctttttcttgccgcgcaggtcaacgtgctcgtagcttgtatcactctgcatgaaacgggcgtttgtggtgtcgctcagcatggtatcgagaattccgaaagcgcgggccttctgtgtttcgtcctcgatggggaaaacaagctccacgcggcggtcgagattgcggggcatccagtccgcgctgcccatgtaaatgcgcgggttaccggcattttcaaagcggaagatacggctgtgctccagaagctgaccgacaatgctcatgacagtgatgttctcgctgacgccttcgatgcccggaatgaggcagcagatgccgcgcacgataagctgcacgcgcacaccggccttggaggcttcatagagaagctcgatgatcttcgggtcaacgagggagttgactttgaccgtgatgccgctgggcaaaccctttttggcgttttcggtctcctgacggatcatgtactcaaagaagctgcgcatgccgtgcggcgcaacgatgaagtgcttgtactccggcggacgggaatagccggtgatgacattgaaaagggaggacgcgtctgcgccgaactgctcgttgcaggtgaacaggccgaggtcggtataaattttcgcggtggagtcgttgtagttgccggtgccgaggtgcaggtagcggcggatgccgtcttcctcgcggcggacaacgagcgcgattttgcagtgggtcttgaggccggtcagaccgtaaatgacgtggcagccggctttttcgagcttctttgcccagttgatgttgttttcttcgtcaaagcgcgctttcagctcgacaagcaccgtgacctgtttgccgttttcggcggctttgatgagcgacgcgatgatgggcgagttgccgctgacgcggtagagcgtctgcttgatggcgagtacgttttcgtcttctgcggcttgtgcgatgaactgcacgacacagtcgaatgtctcatatggatggtgaacaaggcggtcgccctcacggatggccttaaaaatatcggtgtagccgaagaaatcgcccgggggtgtggtgggacgaatgggcgcaaagcagagtttttcgcagcccgggatattcgcaaatttcgagaagaacgtgaggtcaatgggtccctgcacttcgtagataccgctttcattgatattcagcgcttttatgagaaatttgcgggtatcttcatcggtgtgctgcaagagctccaagcgcacgggacggccgcgcttacgacgcttgatggacttttcaatctcatacataaagtcgtccgcttcctcgtcaatggtgaggtcggagttgcgcgtgatgcggaacgggcacacggctttaatctcgtgcagctcgaaaagctcctcaagataatcggtgatgatgtcctcgagcaggataaagcagcgtgtgtcgccgtctgcgggcagctccgtaaagcgcggcagaatggacggtacctgcacaacggcaaagcacttttcacccttgttttccttggaagaaaggcgcacggcgaggttcagacttttatttgcgagcatcgggaacgggcggctgctgtccacggcgagcggcgtcaacacggggaacagcacgcgatgaaaatactcgtccgtaaaggctctttgctcgtgcgtgagcttttccggcgtgcggaattcgatttccgcctgctttttgaggaccggcaaaatagagcggtataggcaggaatactgcttttccataaaggcgtgcgtttttttatcgagcgccgagagaagctccttcggcgtcatgccggaatcatccggctttgtgtagtttgaggcgacctggctttttacaccggccacgcgcaccatgaagaattcatcaaggttggagccggtgatggcaaggaagcgcaaacgctccatgagggggttatctttcttttgggcttcttccaaaacgcgcgcattgaagtccatccagctcagctcgcggttataatagtaattctttttatcagacatggtttccgtcctttcgttatttcagcagctcgcttttgatttgcagctcggggctgagaccgaatacttccttaaagagaccggcgcattcctcaaacgcccatttttcgagcagggcactgccggaagcgacggctttgatctccagcttttcgtttgtaatgcggattttactgatgcgcagcttacggcgcttcgatttatcgagcgcgtttgcaaggcggaagatggcaacgagctttaagatttccaaacggcgttcttccgtcatcgggattgcacctgcatcggcaacattcggcatggtgaactcatcgctgccggcgacgaatgccgtgagcaaaatttgttcgtgcgtgaggccgaaaatgtcgagatccttaatgaggtcgaatgagcaccggttcggcatgcgcacattgatgtattgaccgcagctgtgcagaatggacgcgagctgcaaaatgatttttttgtcacttgacagaccgtgcaggtttttgaatttgtcgaaaagcgtgcatgcaaactctgaaatggcgtcggaatgtgcgccgtggcagttgtattttgccgcgatgcgttttgcggaaacaatagcgctttcgtttgtttgcgcaatgtattctttttgcgcgcccggcacgagcatatggcgtgtgatggcatcgcaaatatcgatatccgggcaaatgactttctgcacgccgtccgaaaggcgcagcatgccggtatatatagaaagcgctgtgtagagaatttcggcaagctcctcggaaatgttgtagcggcgtgcgatggcagaatgggacatcatgcggatttccttatacgccgcgtgcattttctttgcggagatggtgtaaaggtcgccgcttttttcggcgccgcacacggaggcgacaagctccagatcggaacccgtcaaaatgatgctgcgaatgtcttttttcggaatatcgacgcggtttaaaatgatgtcgagatattcttcgaccgcggggtaaaaatcgtcgcactcgcggctgagcgcaccgagggcatcgtgcagctttaaggagccgatggggatgttctgcgaggtgcagatcgccttgccgtcgtacagagcaacaccgatgctgcccgtgccgacatacgcgatgagcgcgtctttcatctcgatcttgctttcttcttttaaaagtcggataatctcggagcagatgagcgctttttcttcgctgtattccagaatttctaagtgcagattgttgtgaattttgagttgatcgatgacgaacgagcggttttccgcctcgcgcatcacggtggaggagaccacgcgcacgtttttgcagttgtagccctccagcgccgttgtgaattttgtgaggatagaggagagttggcgcaggctttcaaagctgatgcgtcccgtggtgaagacctcgtggccgaagaacacagggtattcgagagaatccagcatttcgatctcgccgtgctttaactgcgagacacgcatgcgtaccgcactggagccgatctcgatgaccgcagccggcccgctcggaagttttttattcaatatgagcaccgcctttcaatgtagagcaactaaatcggagcgccgctgaaagcgggcccgcaagaattcttgagatatttactttattatagcaaacccgagaggaaaaagcaccctgttttcgccgaattttacataaaatatacgtgagccatataattgaatgaaaaagatgcagcctgctatatagttttaatatataaatgtgcaaatatttcgcacaatattgcctaaaaggaaataaaattaaatttttttgaaaaaacacttgcatttttgaaagacatgcgctataataatacccgtcgcgtggagaggtattctaatggtaaggagccacattggaaatgtggtgtgccgcaaggcattgtgcgttcgagtcgcatcctctccgccagtacccggataacggaagttatccgggtttttcttttatccgcattgcattttgataacgcagactatatactattatagagtgaaaaagaagcaagagcaatatgcccaaacgtttaaatttggaggagtacacatgacatacgaaaacccaattctgccgggtttttacccggacccgagcatttgccgtgtaggtgaagactattatcttgtcaacagttcgtttgagttttttccgggcgtgccgctttggcatagccgtgacctgctgcattgggagcagcttggctatgttttgacgcgagaaagccagttgccgctggtggactgccgcacctccggcggtatttttgcgccgacgatccgctaccacgacggccgattctatatgatcacgacgaatgtgacaggcggcggcaatttttttgtgtggacagatgacatccgcggcgagtggtccgacccgatctggatcgaccatcagggcattgacccgtctttgttctgggatgcggacggcaaggtgtattacaccggtacacatacggacgaaaacggcaacaactgcatcggacagtttgagattgatcttgagaccggcgcaaagctgagcgagacaaagtgcatttggtacggtaccggcggcaaatgcccggagggaccgcacatgtaccgcatcggcaattggtattacttgatgattgccgagggcggtacggagtacggccacatggagaccattgcgcgcagtagaagcgtgtggggcccgttcgaatcttgtccgcacaacccaatcctcacgcaccgtaatgcacaccgcgtggagtttcaggcgctcggacatgccgaccttgtagagacgccggagggtaagtggtggatggtgtttcacggcattcgcccgtctgttttcatgctgcatcacaccggccgagagacgatgattgcgccggttacatgggatgagaacggctggccggtcatatacggtggcaaggagattcagcccatcatgacggcagagggcgaaggagacgtgcgtgttgcacgcagttggcacgatgatttcaacacagctgcccctgcaccgcgctggagctatctgcgcacacctgaccgcatgaagtatacatttgataagagcggcgttacactgcgcggcagtgaggcgacgcttgacgagctgaagacggtcacattcttcggtgtgcgccaacagcagtttggtttgaactatacgaccgaaatgacgctttccggcgacggcaaagcgggcatgacggttttccacacgaacgagcaccactatgagctgtttgccgcgcgtaaaaacggcggtatggaggtcacgctgcgccgccgtgtggttgatatgctgatcgagagcgagcctgtgttcttcccggaaacggacacgctgacgctgtgcatccaggccaaccgcctgcgctatacgttccttgcgggtaaagccggggaagagatgaaagagatcggcaccggcagcacgcagctgctttccacagagtgcatgaactgcacgtttacgggctgctttgtgggccttacggcgcagggggactgcgaagcaaagtaccgttattttgacgtttctgtgcccgcaaacgaataaaattcgaaataataaaaaaaacacttgcttttttcaccggtttaacgtataataaattttgttaagccggtgtgttggaattggcagacgagacggactcaaaatccgttgatggcaacatcgtgcgggttcgacccccgccaccggcaccacactgagatcccaaacttcttagaaatgagaggtttgggattttttattttacccgtcagtataaataaaagcggcgccgagaaattttttgaaaacaaaatacacgaatgtgaaaaaagcgcagttggtatgatatgccccttaatacgggacacccagtattggggggcatatcagtaagagaaaccgaactgcgcttttttctggttttagggg

SEQ ID NO: 1715 - DNA, 23353 bp, Unknown
  gut microbiota DNA sequence
gtaacaatttttgtaaaaaaccggatttgcgtcggtttaatcctcaacgatgatggcgttttcttctttgacttcttccgcaagcagcatgcgcacggggtgctcggcagtatacggttgccatgtgggcaggccctccccattcgggtcgccggtctttgcgaagtttgcccagtaggaggacattgcagcttcaagcgtatagtcgcacggttcccacgggcgccagcatctgttcatcgtgtggaaaacataccacagctcggacgaatggaacgcacctgcgttgtcgcccggcaactgacggttgaagaaatagacgtagctcgggcatctgccgagtttattctggttcttcgcccagcgcacggcgctcttttcgagaattctatcgtccgctgcgatgtcgccgccggtacagccgatcatgtaatcgatgtcgtgcgtattgccggaaagcgccacttcgtctacggaagccttcagcagcacgttatcaacaacgggctgccacgcaaggccgcttggggactggatggtatactgcacctcagcgatcttttccgccgggacagcacgcatctcttcgatgtttttcgcgccgagcttttccatcagctctttggaggacttcacgcgcatttcaatggaaacgtcgtgcgaaaggccaccaaggccgcctgcgctctgcaaaacggcacgcttaatcttgccgcgcgtcaaatcggacgaaataagcgtctgcacgctcatgcagcctgcagactggcccgctgccgtgatgcagtccgggtctccaccgaacgccgcaatgttctcgtatacccagtcgattgctgcaacctggtcgtaaattccgtagttgccgctgattccctcggggttttcggcatcgagctccgggtgtgcaaagaagccgagtgcgccgacacggtagttgatggagacgaacaccacgccgtttctcgcaaactgctcgccgtcgaactccttttccgcgccgctgccgtgcgtgaacgcaccgccgtgaatccagaagaacacgggcaacttatcgcccggctgcgcagatgcaggcgtccagatgttcagatacaggcagtcttcgctctgctttaggttttcatcactgtaaaactccttgccgtagagatccattttggacaggtcagtctgcggtgctttggcggagaactccagtgcggggcgcacaccctcccactttgcatgcggctgcggacgcttccagcgcagctcgccgaccggcggtgcagcatacggcacgcccttgaagatcacgctttgtttatcatcggaaaacacaccttcgagtgcgccttctttgacggttacgatcgtattcattgaaacttcctcccagggataaaattcacggcaacgccgcggataaatttctgcggtgctgtcggtggtttataaatttagtttacgcgttaagctgcttcaggagcatctcacctgcgccggcgggcacactgtcgccgccaaacgataacagcgcacgcagcggcatttccgccatcatacgcgccatggcctcgcccatgccgatgtcgtccgcatctgcctgtgcaagcgggttctgtgccatcatcttgccgagaatttcgcggccgacgggactttccataatctcttcaatcgtggaattcattgtgtagacgcgcttaatctgcgtagtagaggtgacgttcaccgtcgcggtgcaggcgatgtcgcggctggattttgccgctatgatcgtgtagtcgccggactcaacgtaccaatcggaaatatcggtgcggtagtacgcgaacgcacgctttgcgagcgtaaaggtgacggtcttctcctcacccggctcaagctcgaccttttcaaagccgcgcagctcttttacgggacgaatggtgtggcttttcggcatgccgacgtacagctgcacgatctctttgcccttcaccttgccggtgttgcggacgttgacggagacggtcagcgtatcgatgtccttcatctcggacttatcaagcgttaaattgctatattcaaatgtcgtatagctgaggccgtagccgaacgggaacagcacgtccatgttctttttgtcgtagtagcggtaaccgacaaatacaccctcgcgatactcggtcttattctgctcatcgccgaagaaatagaggtacgaggggttatcctccagacggtgcgggaacgtttccgcgagtttgccggaagggttcacatcgccgaacagcaggtcgagcgtcgcggtgccgacggcttcaccgccgaggtatgcgtatagcacgccgcgcacgtcatcaatccacggcatggtgatgcagccgccgcacatgacgacgacgacagtgtttttctgcacttcggaaacagctttgacgagtgcttcgtggtttttcggcatcgaaagcgtgcggcgatccatgccctcggactccatggcgtctgttatgccaacgaatacaacggcaacatcggcgttctttgcggcctcctgtgcttcctcgaggagcgcttcgtcggactctgcggtgttcgtatcgtagccgggcgcgtaggtgacatcgagcccctttgcagcctcgagcgcgcttgtgaccttataggagttcacatgcgagctgccgccgccctgaaagcgcggagtctccgcaaacttgccaataaacgctaacttctgattgcgctttaacggcagaataccatcatttttgagcaagaccatggattcatccgcaatcttacgcgcttcttcgtggtcggcttcaaagtcaatctttgtttcgggctgcttgttttcggtgtatttgagaacgatgttcaaaatgcgctccacggcggtatcgagcaccttgatatcgagtgtgccgttgttgaccgcgtcaacgatctgcttgtcgtttgcggcgtttttgccgggcatttcaagctccatgccggcttcaaggcactttacgcggtctgcggtggtcgcgccccagtcgctcatcacgtagccgtcaaagccccactcgtcgcggagaatatcggtcagcaaacgcttgttttcagcggcgaatgtaccgttgatgcggttatacgagcacataatcgtccacggcttcgagtcctttacggcagtctcaaacgcagaaaggtaaatttcgcgcagggtgcgttcatcaacgacgctgtcgctggacatgcggttatattcctgactgttggcggcgaaatgcttcacgctgacgccgacattctggctctgcacgccgtttatgtagtttttggcaagctcgccggcgaggtacgggtcttcggaaagatactcaaaattgcggccaccgagcggagaacgcttgatgttgatggccgggccgagcagaacagaaaggtcctccgcctggcaggcgtggccaagcacttcgccggagcgacggaacagctcgcggtcgaatgagcacgccatgcaggagcctgtggggtagctggtggcgggcacgctggcattgaggccgaggtggtcggcggcgtcagactgcttacggatgccgcacgggccgtccgagaccatgacggattcaatgccgaggcgctgcggagtatcgagatgccagaagtctttaccggagcaaagcgcggctttctcttccagcgtcatttgagaaatgatcgatttcacatccatacaaacaactcctatgactgatttgagttcagtatagcacactttcgcgaaaatttccatagacaattcagaaattttgttgactttattggtagaaagatattgtaaaagccgatacgattacatcggcttttcatcacaatttgaatagtttctcaaagttatcgtaaagcatttttcggttctcttcctccccgtaggcgagtgcaaaaaagcgttcgagctccttttcgtgcgtccacatggggaaatccgtgccgaacatgactttatccataccgaaatgctcaatgctccttcttgcttcgtccgggttcaacacaaacagcgagctgctggtatcgacccacacgttcgcgccttttaggcacgctttggcttcatcccagcgccggtaaccgccgagatgcgcggcgatgcactttaattccggcagcttttcgagcacattcgcaagcttcttcggcgcagagagctcgcttctggcgtcacccatgtgaaataaaatcggcagatcgcgcgccatgcaggctttgtagaccggcagcattttttcgtcatcgatggcaaagccttgaaaatccgagtgcagcttgatgccgtgcaggccgagcgcctgaatttcattgagctctttttcgacatcctcaatggcccggtgccatgcgccaaggccgacgaacttcgggtatttttcgcatttggccgcgatgaaacgattgatggagccaacctgctccacttttgtcgcaacggagcagacgagaaatttatcgaatcctacggcggtgccctcttcgtttaaaacgtgcggcaggccgacctccgccatgggaagatcataaaaacggccaacgttttcggtcgccttttctgcaatcttgccggggtaaatgtgggcgtgcgcgtcggcggcacggtacaaaacgccgttatgcttcaccatgcgccttcgcctccctttcttttttcgagaacacacagccacagaaatcctgccgatataggttatagtctgccgaaagctgaatggagcgcttatagccctcctgttttttgaaatcggacggcaagtgcggcacgccgtatttttctgcaagcgcttcgccgatctcgtttagcttctgcgcgtttttcagcgggctgatggacagcgttgtcgtgaaaaaatcaaaatgatgccctgcggcatactttgccgctgcttccatgcgcagcttgtagcacgcaaaacagcgctcgccgccctccgggatgtgctcaagcccgcgcacggcggtgaagaattcttccggcacgtaaggcagatcgacaagcgctactttcttggtgcatggcatttcggagataagccgctttaactctgcttcccttttttgatactccgcctccggatagatattgggattataaaacagcacggtaattttaaaatgcgctgtaagcttctccaaaacggcgctggagcacggcgcacagcacgcgtgcaagagcaaagtcggccgcttttcctcgtgcgtaaaggtttcgatgagtgtattcagttcttttgcgtagtttcttttattagccatgactttattttatcaccgaagccccgttttcgcaagatatgtatactctttatcacaaatttcttacaaatccgccgtgtgaattgacaatattgccgtttcgcggtaaactatatatatcaaattgtgctcatacggcgcatttcggtgtttgtgtgccgttttacagaaaggtttcgtgacatgttcgatttttctatattgatttccaacccgctcatcaacgtcgctgttgtttcgtggtgtgcggcacaaatcttaaagaccagcatccatctttttaaacacggcgaatttaagaaagagcgtctctccggcgcaggcggcatgccaagctcccactcggcggtaacgtgctcggtgctgctgacctcttaccttatctacggcttttcctccccgatcttcgccatggcgttcgtgctggcactcatcgtcatgtacgacgcgaccggcgtacgctgggcggcgggtctgcacgcaaaagccatcaactacattgtggaatatttaggcgatgagaacaccaaggacaaagaccaactgaaagaaatgatcccgaagctgaacgaatcgcttggccaccgcatgatcgaggtggtgtgcggtgcgctgctcggatttgcgatctcgctcatcgggtacttctgcttctaaaattcaatttgcatgaaaaaacgttgcacggagctttcctgcagcgtttttattatggctctttcctgcggttttgaacgcggcgtatgagcagcgccgagccgccgacagcgagcacgccccagccaaagaggagcgatgcacggacaatccattgcccggctgcgttctcttgcttctcgccatgaatgtgaagctttgcgtttccgccttccccgcactgcacggtaaatgtcatgctctcttcggcggtaagcgtaccgatataaatctcggcaaacccgagtgcagcgctgtcccccgagaaaagcatcacactttgcccgttttgcacacgcagaagctttacttcaccttggctttcttctgccgtgagatataactcaagcggcacggtacattcgtttttgaatacaaggctgaggggcacgccgctttcggctatgacagtcttttctaaacggtctccgctgaaaaacaccggcagcaaaaacgccgtgatgaacgccaggacccgaaccgaaaacatgcgcacccctcctcggccgccgggcgcgcatcaccatacgcgccgcctgtaagagggcaccgacgggcctttttcttcatgtatatgcgtgcgcgccggcgttatatacgcacggtaccgcatgacgatctccgcatgcctgccgaacagcttttccaaaagcgtcaggacggtctttttctcttcgcgatagtgctttccgtgtttcatcgttttcctatgccctttccgtaaattttgtgatctctacggataaaataccacgacacggcgaaatattttgtcattcccatcatgcggaaatcttgaactttccacgcatttgtggtaaaataaatcggttattttgaatttgtgaagaaacagaggttatcatcttggccgattttagaaatgagattgaaaaacggcgcacgttcgcgattatttcgcacccggacgccggtaaaacgacactgacggaaaagttccttctgtacggcggcgccattcagctggccggtgcggtcaagggcaaaaagaatgcgcgccacgccgtttccgactggatggagattgaaaagcagcgtggtatctccgtcacctcttctgttatgcagttccagtatgagggctactgcatcaatattctggacaccccgggccaccaggacttctctgaagacacgtaccgcacgctgatggcggcagactctgccgtgatggtcattgacgcttcaaagggcgttgaggcacagacgagaaagctttttaaagtctgcgtcatgcgcgatattccgattttcacgttcatcaacaagatggaccgcgacgcgcagagcccgtatgatcttttggatgagatcgaaaaagagctcggcatcggcacctacccgatgaactggccgattggctccggtgtggacttcaagggcgtttacgaccgcgaaaagtccgaaattctcgcgtttgaaggagacaaagagctgcgcggtcaacacgaagtcaaagcgcacgagatcgatctgaacgacgcagcacttgagaccattctcggcgaaaacctgtgccagacgctgcgcgatgacgtagagcttctggacggcgcgggctatgaatttgaccttgaaaaagtgcgtcatggcaagctctcccccgtgttcttcggctccgctttgacaaacttcggcgtggagccgttcctcgagagctttctgcgtatgacgacctccccgctgccgcgccaaacctcggagggtgtggttgacccgttcagcaaggatttttctgcgttcgtcttcaaaattcaggcgaacatgaacaaggcgcatcgcgaccgcattgcattcatgcgcatttgcagcggcaagtttgaaaaaggcatggaggtcacccatgtgcagggcggtcgcaagatcaagctttcgcagccgcagcagatgatggcgcagagccgcgaaatcattgacgaggcgtatgcgggcgacatcatcggtgtgttcgacccgggcatcttctccatcggcgacacgatctgcacaggcaagaaggtgcaatttgagggcattccaacgttcgcgccggagtttttctgccgcgtgcagcaaaaggacacgatgaagcgcaagcagttcgtcaagggcactacacagattgcacaagaaggcgccattcagatcttccaggagatcgcctccggcatggaggaagtcattgtaggcgttgtgggtacgctgcagtttgacgtattcaagtaccgcatggaaaacgagtacaacgttgaaattcgcatggaaacgctgccgtactcactcatccgatggatcgacacgccggacgtggacctcaaaaagctgaacctcacgtccgacacaaaaaaggtgcaggacatccgcggacgttaccttttgcttttctcaaatgagtggagcatccgctgggcgctggagcacaacgaaggcctggagctttccgagttcagtcgctaaattttataaaaagcaacgctctgtatggtttttgtgccgtacagagcgttgttgttatgtattgctgcttgatttttgcttgtggctgtccgcgacgaactctttcggcgtcatgccggtgcagcgcttaaagcgtccgcagaacgaggcggaatccgaaaagccgcaggaaagcgccgtttcactgacagtatatgtacccgccagcagcatttttttcgccgcattgatacgcacctgcatcaaatattgcttcggcgacatgctttcggaagcggagaaaatgcggtagagatacgtgcggtctatgccgatatgccgcgcgaggtcgctgatctgaatgggatagccgtagttgcttttgatgtagccgatggccttattcacatactcatgctcgcgggtgtacgcgccgccgtgtgcggattcctccaaaacggacatcgcaccgtaaaagccactcatcactttaaataagctgcctttgttgaattcgtcgatcatctcgtgcatgtagcggataaactcgtcgccgttttcaagctttgttgtgtattggctgacaagacccgtgcggcgcaggatctccagtacatcaaagccgtcgaatgcgacccacatgtactcccacgggtcttcgcgatcggcaatgtaatatgtgcgctcacccgggcggatgaggaagcactcgtttgcgtgcagcgtgtaggtttcttctccgacggtatatgtacccttgccggagatgacgtagtgcagcaaatactgattgcgcacggccggaccccagaaatgcccgccctcacatttttcgtaaccgcagtaatacacggtaacagagccgccgttattcaaattttccgctctatgctttatggtgttcatacccgtccctacctttgtaattccctattcagtatagcacacttaaacacaaaatacaacaaaatcacaacgaaaagaaacaaaaaatatagaatctgcacactatgcaccgtataatgaatataagaatcgtttttatggaaggagttacaaattatgccaaaaattacattcatgggcgcgggcagcaccgttttcgcacgcaatgtgctcggcgactgcatgtgcacgccctctctgtgtgagagcgagatcgcgctctatgatatcgatgccgagcgtttggaagagtcttacatcattctcagcgctatcaataagaatacgaacggcggcaaggcgacactgaagacctattgcggcgttgagaaccgcaaagaagcgctgcgcggcgcggacttcgtcgtaaacgccattcaggtcggcttctacgacccgtgcacaatcatcgatttcgaggtgccgaagaagtacggtctgcgccagacgattgccgatacgatgggcattggcggcatcatgcgtgcactgcgcaccattcctgttttggaagattttgcccgcgacatggaagaagtttgcccgaacgcatggttcctcaattacacaaacccgatggcaatgctttccggctacatgcagcgctatacgaacgtaaagaccgtcggcctctgccacagcgtgcaggtctgctctaaggagctcctaaaggcccttggcatggaagataaggttgaaggtcgccgcgagctcatcgccggcatcaaccacatgggctggcttttgaagattgaagacaaggacggcaacgacctctaccccgagatcaagcgccgcgccgcagaaaagaatgcaaccgaaaagcacaaagatatggtgcgttatgagtacattcgccgcctcggctactactgcaccgaatccagcgagcataacgcggaatacaatccgctcttcatcaagtcccgttacccggagctcattgaacagttcaacattccgctggacgaatacccgcgccgctgcatcaaccagatcaagggctggaaggaagaaaaagaaagcattttgaaggacggcaaagtggagcacacccgttccagcgaatatgcctcctacattatggaagctatggtcaccggcaacccgtataagatcggcggcaacgtactgaacaccggacttatcgataacctgcccgccgatgcgtgcgttgaggtaccgtgccttgtggacaagatgggcgtaaatccgtgccacgttggccgcctgccggtacagcttgccgcaatgaacatgacaaacatcaacgcacagctgatgacaatcgaagcggcacgcaccagaaagcgcgaggacatctaccgcgccgctatgctggatccgcacaccgcagccgagctttccatcgacgacatcgtgaagatgtgcgacgacctcatcgaggcacacggtgattacatggcgatgtacaaataactcaacgttttcctccattgatacttctataaaatacacccgcaggaacgaaccgcctgcgggtgtattgctttctaaccaattttactcgccgtcttccccgttgctttccgcgctgacgaggatgcccacaacggcgccgtgtgcaagcgcatcgccggggctgtcggactgataaccgatgacgcggccaatctccgtataatcgttgacttcggcgacctgcaccggctcgaagccgagggcttttaaagccgttacggcttcgtcggcagtcatgccttcgatatccggcaacgtacgcagctgcgggcctttgcatacagcaatctttaccgtgctgccggcctcgacgatctcgcccgcgagcggatattgcccggtaatttgcccctccggcaatgtatcgctgaatgtttccttgtaaatttcaagctcgaatttatattttttgtccttttctgttaaggagagcagcttgtcgtaatccataccgacaaggttcggcacctcaagcgtttgcttttctttgacaacgcccggatctttgatgaacgcaacgatgctttgcggcgagaatgggctgtctttgaaccacacgctcgtcacggcaaagatgacgacgagtgtaaacacgaatgacgcgacaagccacaggaaagtaggcacgcgacgcttgctcggcgtgcggccggaaccgctcggcagcgagcgcaccgtttcggtctcgacgaatttttccacaacggtcggctcagcggcaagctctgcggaaaagcgcgagaagcttgacgtgcggcgagagggatcaacctgcaggccgtttgcaatagctggaataacctgctccggcagctgctttaggatatttttggagatcatcaggcgcgggtcctgcttgcgcttcggcgcttccatgggtgcggcgcccgtgagcgcgaacagcaacgatgcgcacaggccgtaaacgtccgtgacctcatcacagattttcgttttggagtactgctccagcgcccagcagccggggaaaatatcctcaatgaggtcggtgccggcacggcgcacagactgtatgtcaaagcccgtaacgatcattttatcgtcttttgtgatgcgcagcgtattcggcgagataccgaggtgctcgacgttctgcgcatgaatggtgccgagcgtgtgaatgaccgggtaaaagaactgttcgcactgcgcccagcttagaacgccgtgctcctccacgtactgtcgcagggaaacggactctgtgaacgagaacacgatgtactgcgtgttgttctgcgaaaacgtatcgatggcgcgctgaatgtgttttgtatcggaaacacgcaggagcttctgcgcatagcgctcgaactcgcttaaatagtcgctgaacttgagttctgccccgctgaccggcagtacggacgcgccggtctcgccgcgcacagcgatggtatgcggataaaactcacgcacctctaccttctgcgccgttttggcttccaacgcggcgtatgtaatgcccgcgccgttgacgtgcacggcctgtcccacaaggtatttttcgccgagcaatgtgccgtacggcagcgcgtttttcacctgatcgccgttgtgccagccgcagtgcagacaggtattgctgccgtcctccattgcttcaaagcatctcatgcaatataatttgttctctcccatgcgctcagcttcctctcgatctccgcttcggaatgcggtgcatttttatacaacatccccgaaaaattcttttcactgaacacagtataccacattttgcctgtgctttcaaggtgtgtacgcacccgaaagcgcgaagaaactgtcggaaagctgcaagggccgcaattttaatgaagttgtaagaaaaattttgcttttcttttctatgaattcgaccaaaaaaagaacgccccagtcataggagcgttctctgtaattcgatttaagctgaaattaagccttgtcgatggaaccgaagagctccatcttttccttaacggtagccttaatagcctcaaagcccggagcgaggagctttctcgggtcaaagcccttgccctcgaggtccttgcctgcttcgatgtactttctcgtagcatctgcgaaggagagctggcactcggtgttgacgttgattttggaaacgccaagggagattgcttccttgatcatgtcagccgggatgcccgtgccgccatggagaacgagcggcatggtgccggtgagcttctgaatctcagcgagaacgtcgaaattcaggcccttccagtttgccgggtacttgccgtggatgttgccgatgcctgcagcgagcatgtcaacgccgaggtcagcgatcattttgcattccttcgggtctgcaacttcaccgccgccgataacgccgtcttcctcgccgccgattgcgccgacctcagcctcaacggagatgccctttgcatgagcgataccgatgagctcggtggtctttgcgatgttctcttcgatcggatagtgggaaccgtcgaacatgatggaagagaaacctgcttcgatgcaagccttagcgccttcgtaggagccgtggtcgaggtgcagagcaaccggaaccgtgatcttcagggtctccagcatgccgtttaccatgccaactacggtgttgtagccgcacatgtacttgcctgcgccctcggaaacaccgaggatgaccggggagttgttctcctgagccgtgagcaggatagcctttgtccattcgaggttattgatgttgaactgaccgacagcgtatttgcctgccttagccttgtccagcatttcctttgcagatactaacataaattcagcctccatgatccatgaaaggatttttatttctttgtatattatagaatatacggcgcaaaaaatcaaccctatttgaaaatatcgggctgtttcgcgttattttacaaaaaaagtaagaccttttcgcgatttcttacgacaaggtcttacaaaataccgtttatattcagttatcggaagacttgcgctggagcaggacggcggcgatgatgatcgcgcccttgaaggcttcgcgcaggaacggcggaacgccgaggagattgaggaggttgttcataacggcgatgatgagcatgccgaatacagtacccacaacggagcccttgccgccggacatgctggtgccgccgacgatgaccgccgcgatggaatcgagctcataaccgctgccggcgtttgccgggtccatagcgccgatgcgggagacctgcaatacggccgcgatagcgacaaccgcgcccatcagcgcatatacgccgagctttacacggttgacgttgatgccggaaagacgggacgtcttctcgttggagccgaccgcgaacacgtggcggccgaacacggtcttcttagagacgatgtacagcacgagcgcgatgaggagccaatagaggatcggcatgaacatctggccgccgaccttcacacgggcgatctgctgaaaacccgtcggaaccttcggcgaactggactgcatgaactgctgcgtcacgctgcgcaggatcttcatggcaccgagcgttgcgatgaacggcggaatcttgcccgcagtgaccatgaggccgttgaggccgccgaaaatgatgccggccgcgacggagatcagaatggcaactatgtacgcaggtgcgccggtaaggccgatcgcgccaagccagccgccgtttgcggcgtcgatgagcgtcatggtaatggcgccgaccgcgacgagcgtggagccgacggcaagatcgatgccacccgaaataatgacgaacgtcataccgagcgcgatgataccgacgctggagttgttacggagaatgttcatccagttgttgatccatgcgccgaaccattcgccgaagcttgcatagtcaaagccgagcgcgagcgtctgcagaataaccatgacgatcagtgcaatgcctgtggaaaacagcgcattattcttccaattatcgcggaaccatgcgccaaagccctttttgtttgttttttcgttcattatacctgtccccctgttgcaaggcgcatgatggcctgctcattcatttcatcgccgacaagctcgccctgcacgctgccgtggaacatcacgacggtgcggtcgcacacgcggataatctcctgggcctcgctggaaagcacaatgacggcgacgcccgcctctgcgagcttcaggataatatcgtagatttcctccttagcacctacgtccacgccctgtgtggggttatcgaacacaagcacctttgggtttgcatccagccactttgccagcaccaccttctgctggttgccgccggaaaggctgccgatgagatcttttgcggagccgagcttgatgtgcagctctttttcgagatcatcaaaatccttttcaatcttcttcgagtgcaaaaagcccatcttgctgtctctgggccatgtgacgaccgtgccgttttcaagaatactcatatccttgatgatgccgttttccttgcggttgcgcggcacatagccgacgccggccttgagcgcctgccccgtagtgcggatatgtacgggcttgccctctacttctaccgtgccggaagccccgtgtgttgcaccgaaaaccgcctgaaacagctcacttctgccgtcgcccaaaaggcccgtgaaaccgagcacctcgccggcgtgcgcttcaaagctgacgtttctgaaatgcggctccaacgtcatacccttgccgcttaaaataacattaccaatctttttctcacggcggagcgactgtgtgcgcacatcgtggccgaccatgtcgcgcgccagcatatcgacagaggtctccgagacaaggccggaggaaaccatattgccgtctcgcagcaccgtgtagcgcgtgcagatctccatgacctcgcgcagcttatgagaaatgaacacaatgcctacgccgctctttctcagcgtattcatcatatcgaacacacggcgaatttccggctccgtaagcgaagtggtcggctcgtccatgatgatgatggaagcctccatcaaaagtgcgcgggcaatctcgacaatctgcttataggaagcatcgaggtcgcgcaccatgatacgcgggtcgaggtcaaggtccatttttttgaaaacttcgttcgttttcgcaatcatcgcggcggaatccagaaaacggttcttcttccgcagctcgtggccgataaacatattctcgtaaatggcaagatcatttacaaggtttaattcctgatggataaaagcaatgccatgcttcagggaatccgccggcgtttgaaacgcaacgcgcttgccgtccaacaggatctggccctgatccgcatgatggacgccgccgagaatattcatcagggtagattttccggcgccgttttcaccgagcagcgcgcagatctcgccgccgtttaaggtaaacgaaacgtcccgcagaacatcgtttgcaccgaaggatttgtaaatccccttcatttcaagtgtcatacatacactttcctttctgtatggcgtacaaataggagatctgccgcccatagaagacggctatccccttttaacaaaaaaggctgctgcttacgcaacagcccctttgcagaacttttaaattagtaaacggtgttctccgggtcgaggtactcgtcaacgttgtctctgtcaacaactgtcgtcgagataatcttgaccggctctacgtccttgcctgcgagaacgtcaagtgccatatcaacagcgtccttgaccatcagcgggctgtaaagagaagactcaatccaaatgttctcgttttccttcatcatgttgaagtactcctggcagccgccgccaccggtgatgaccttaatgtcgtcacggtttgcttcggaaatagcctgcagaacaccgatggaagtctcgtcgtccatggagtaaacagcgtcgatgtgatcgttgctggtgaggatgtcggcgaagtcagcctgaccggcttcacgggtgaactgcgtagcatactcaacaatctccatatccggcgcaatctccttgatggtatccatgaagcccttcttacggagctctgcaacggaaccggaggtcggaacgtcgagaacgacgactttgccggtggtgccgattttatcgacaatgtacttagcgccttcaacgcccatggactcgttatcgccggatacacggtaaacgccgtccgctgcgatctcgatatcgaagtttacaacaacgatgccctcatcgattgcttcctgaatcggcacttccatgccttcccactgcgggaaagcaacgatagcttctgcgccccaggacttgaggtcgtcgatctgagaagtcatttcctcagcgttgttgctggtgtagagcttgtagtcgacagtgtcgctcagctctttgcagcgctgctcagcatagtatgcaacacctgcaacccaaccgtgggtaacagccggtgcaaggatgccgatcttggtcttttccgtggaagtgctttcctcggaagacgcggaagactcggattctgcagaggattcagagctgacagcactggattcctcagaggcagagcttgtggaagaggttccgttgcctgcgcatgctgcgaaggtgacgcagagaagcgcgagcgccagaacaatgctcaatacctttttcatgtgtgtttcctcctgtatctgcgatctgccgcagatgatctgaaatattttgagacgttgtgaataaactgtaaacgcctcatacactgggtattttactctttgctgtatactttgtcaatgatatttcatgaaaattttacgtttttgagcggttttctttataagtggcattctccctaccctatctacttgattttctgctttgcggtgtgataaaattttggggaatatggggcgggtttgcgctttgcagctttttaacgcctcactctactcatcgttcggggaaccccctaattgggttccccgagcaaaacagtccaccggactgttttgcttcccttcctgatttttggataggcaaaaagattttgtcgtctgcggacgacgatttagggcgctgccctaaaaaaccgcaaccgaacgcgtgcgttcggtttaagcttcttgaaaaagcttgcgcaaagctttgtgcgttcgctttactttagcttagatagcttcaatattaaataattgaaagtgtgtttttatggcaaatatcattcccatcacgtccttttccgcgccggagctggatgtttttgcgcggcttacggaaaaccagcttgtcaaccgcgccgaccccgcaaacgcaatgttcattgcggaaagcccgctcgttatcggccgcgccttagacggcggctgcgtgccgctctcttttttaatggaaacgaagcacgtggagggcaaggctgcggaaattctatctcgctgccccgaagatattcccgtttacacggcggagctggacgttttaacacaactgacgggctttaagctgacccgcggcatgctatgtgcgatgcgccgcccggctttgaaaagtgttgcggagatttgcacaaatgcgcgccgcattgccgtgctcgaaaatgtgatgaatcccacgaacatcggcgcaatcttccgcagtgcggcggcgctcggcatggacgcggttttattgaccgccgccggtagcgacccgctgtatcgccgcgcgagccgcgtgagcatgggcaccgtatttcaggtgccgtggacgtatctgcccgaagacgtttcgtggcaggatacgctgcacggtctcggctttaagacggccgccatggcgctgcgcgacgacacacttcccctctctgacccgcgtttggagaaagagccgaagctcgctgttgtgcttggcaccgaaggtgacggccttgcaaacacgacgatcgagcattgcgactacacggtaaagattcccatgtcgcacggtgtggactcgctgaacgttgccgccgcaagcgccgtggcgttttatcaactcggcacactgcacaacaaagtatgagaaaaggacgctgcccgccggggcaacgtccttcgtttttaccacttttcaaaatgcacgcggttttcttcgtagcggctttcacgcggttctttattctctttcgcgggatagccgagtgcgagaacggaatgcggcacgatggtctcaggcaggttaaacagtgcggcttgcttttctacacggtccatctgcggccatgtgccgagccatacagagccgaggccgagtgcatcggcgcaaagcgtcatattctgcgcggcaatggcgctgtcgatgacccaatagtccttcgcaggtgggaatgcacgctcaagatcgccgcagatcagaatggcggccgcagccttttccagcggctgtgccggtctaccgttcgcctctgccatttcaagcagcttttcgcggtcggtgacgacgataaacgaccaatcgcgcgcattcacgcagcaaggaccgctcatgccggcctctaaaatccggtgcagcttctcttcttcaatgggctgtgcggtgaaatcccgcacgcttctgcgattaaaaaggttttgcaaagcatccatacgggcacactcctttatgtttttcgaagtcgttttgattttaccgttattctaccacacaagggaaaaggttacaagcgaaacttttctgagattctaaaagcactgaagcaccgttatattggagtttcactgctttattttggatttatcgcaacgcgctgcggtattcagcaggcgtcatgtgctttacttttttgaacgccgccgcaaacttactggcgctgtcgtatccgacctgtgcggcaatctcggcaatgttccggcgtttttcacgcaacaaaatttccgccgcgtaattcatgcgataatcggtgagccacgcgccgatggatgtgccgtacgccgccttaaagcaggtcttcatcggcgtcagcgcaaaatcgaatcgtgcagaaagctcttcctgcgtgaagttttcagagacatgctcggcgagaaaatcgcgcacggccttggttttttcaagctgcgtcttataaaagtacggatgcgccgcgttttccttcggcggcgtcatgctatcgagcgcgagcagcagctccagtattttgatctgaaaataggaaatacgtgctttttccggcacgtggtacatttcctcaaagatgtgcgcgacccgctccgtgcacgcaatgaccttaggcattttgttcagcgcaaagcggcgcaaaatcgccgccggggtaacggaaaagcccgccatgacgttcagcagggaacgcgaggcctgctccgggtcgagcgtgaccacgagtccatggtaatggccggaaggcaagtcgagcttttgcgagcatgacgcgccgttttcaagcttcatctcaccggcgctcacataggaaaaagcgccttctcccaacgcgtaggccatgcgcccttcgcggcagtgctcgatcgtgagccgcatacggtcgtcggtctttccgcatacgcagtgcgtcatgtgcagatctcgaaaccgaagctccacacccggaaaaatggtatagcatgtcacagtgccctcgcccgtctcgttgcgcagctgccacacggcacagccgtcactttccgcaagcagcatcgtgttttgctcttcttgttgtatcgcgtcacgcatgatacgcgccccctaacattatgttctgactgcgggaaaagaggccgttgcccgcgtgcggcattgtattaaaagttagcaacttctaactcaaattcaaaaataaaagtgaaattttcgctctatttggtcttttcgccctattttcttgctcgtgatcctttatacgccaaaacagaatttctcggttcacggttgacttctgctttcatttcatgtatgctatatttggaagttagttagaactaacctattcgatttcactgtatacggaggatacatatggaaacattttacggcatattgattccgtttcttggcacctcgctcggcgcagcgtgcgtgttcttcatgaaaaaatcgctcagcgatcgcgtacagcgcagcctgaccggctttgcggcaggtgtgatggtggcggcttcggtatggagcttattaatccccgccatagagcaatccgcagcgctcggcaaactctcgtttctgccggcagcggtcgggttttgggcaggcgttttgttcctgcttttgcttgaccacaccatcccccacctgcaccgcagcagcgaacaggcggaaggcccgaaaagccgactgcaccgcaccacaatgatgatgcttgccgtcacgctgcacaatattccggagggtatggccgtaggcgtggtgtacgccgggtacctttccggcagcgcacagatcaccgccgcaggcgcacttgcactttcgctcggcattgccattcaaaattttcccgaaggcgccatcatctccatgccgttgcacgctgaaggcatgaaaaagtcgcgtgcgtttttggacggcgtgctttccggcgcggtggaacccatcggtgccgtgctgaccgttttggctgcccagctcattgtgccggcgctgccgtaccttttgagtttcgccgccggagcaatgctgtacgtcgtcgtagaggagcttatccccgaaatgtcacagggcacacactccaacctcggcacggtgttttttgccgtgggctttaccgccatgatgatcttagacgttgcgcttgggtgaacggtgtgaatgccattttaaatgctttgctcttttcagccttaacgactccgtttcatcgcgtaaaaaaagttagtttgttctaacctgcaaatctattataacgcgccattcaaaaaaaatcaagggcataccgcaaaagcatttcatctttaacgcggtatgccctgttttgatctcctcgattttttcaaaagttccgcatatagcaaaaagtcctgactttccgaagaaaatcaggactttggtggagcaggggtgctcaaggatgaacacccctccaaagctccgatttcgccttcaaatgccgtttctatatcatccagtgggatattgtcaatgctcaacggcttcttgctggcgttgatgatgagggtaaagtgatcgtcatacaggtagatggactgaacaaagatgttgatgatggcccggcgcttattcacatcgtcggcgggcatctcgcagacatagtccagaaatgctaaaatctgtgcctccgtcagcgtaattttcttgttttcctcgacagcgagctgtgcctccaactctgccttttccgccatgcgcttgttgagccgctccgtcagcatctccacggcccgcccctgctcaatggctttccagagattttcaatggccgcatccgcctctcggatcgcctttttcagcgccttggcggtaagattatccgggcttttggcgcactcctcagccaccttcttggcaatgaagcggattttctcctcggtcagcattttcaaacactcgttgaccacacggtcctcgatataagacttgctgacgatcttcttgccgcactttttcctgcgggcgtttttgcacatatagtagtgatattgcctgccggtcttgctggtgccgccgtagcccaccatcatttccttgcagtgtccgcagaacagctttgtggtcagcaggtattcgccctcgccgtgagttcgggccggcgcacttttgtttttgttcatcatcgattgcacccggtaaaataggtcatcatccagaatgcgaggcatcccgccgggtgtttcctttcctttgtaaagatagacaccgatataacgcttgttgctgagcaggcggctgaggctgttggggctgaattctttgccgagggaggttttgaccctgcgtcgtttcagatcccgaatgatctccgctttcgtctcgccgctggcgtagcgctcataaatctcacggacaatggcggcttcctcttcatccacatagaaccgccgttcggcattgaccttgaagcccaagccggggttgctgccgttggacaagcacttttcggcattgatagccataccccgatggatcttctgagaaagctccacggagtagtattccgccatactttccagaacgccctccaccaagatgccggaagcgtcgtccgcaatattctccttggcagacagcacccggacaccgttctttttcagtttcgccttgttgatggcactgtcatagcggttgcgggcaaaacggtccagctgatataccaaaacgccctcaaaggtgtgcctgtcgctgtcggagatcatccgctgaaattcggcacggttgtccgtggtgccgctgatggcccggtcaatatattctccgacaacggtataatgattcgactccgcatattcatagcacaccttgagctgtccctcaatggactgctccgtctggctgtggctggaaaagcgggcgtaaatgactacattcatacagaatcctcctctccgattttgattat

SEQ ID NO: 1716 - DNA, 53644 bp, Unknown
  gut microbiota DNA sequence
acttttcatagctttttagcagttccgggcaccattggggcaccacagtatacatctttcttgtatagtgtgtatgatgtggaatgagccgggcaccacaaagcggggcaccaagggcaccatttgaattgttttacccaaaatagatgctgtccgagcaagagaaaaagccttgaaaacatagagttttcaaggctttgatggcggaagcggtgggattcgaacccacgtgcccttgcggacaactgcatttcgagtgcagctcgttacaaccacttcgatacgcttccgtgtataaatattcacttttggggactaatcacatgatttcgagtgtcgcaccttcgacctctcggacaactctccgtatacctcaagtgtaatccttgctccggaaggatgcaagaaaaacacgcaagaacgatatgaaattgtgaaatccgaacccgcgcaaagccctgtgcggcggacattttcagcggacgaaacggccggagcttccaaaaatttcgaaacagtcccgttatgaccgcttcgatacgtttccatattcggctaaagcatggaaaaacacgctttgcgcatactattttatcggttttgagagaaaaagtcaagcgttttttggcaaaaaggttgacatatacagggcaatgcggttacaataactgtgtattatgatgcttagaccttttgttttcgcacggctaaagctgtgcggatatgacccggaaagtgaggatgccgcttttgcggcgaatgcttatggatatgaaaaaatggatgcgctgcgctgcgacggtcgttttgagcgttttggtggcgttcagcgcgacggcgtgctcgcagccggcgaatattgaatcaggcgccgtttcgcaggaatacccggtgaccgtgaacgaagtgacgttaaacgcaaaaccccagaaggtggcggtactctccggcagtttggcggatgtggtgctggcgatggggtacgagacgagcttatcgcttgcaagcgacgactgcacacagcccgatttacaggtgctgccgaaggtttccgcaacggatgcgcagagtgtgatctctgcaggtgtggatctcgttttggcggagacgatggacgacagcgaaaagcagacgcttgaaaatgcgggcattacggtgctccttttgacgcgtgcgaaaaaccgcgaggattttgaacgcctgtacgcgcaggtgggcacggctttgaacggcggctctacgggctataatgtaggcgtgaaggcagcacagaagattttctcttcgctcgacgacctttcgcgcttggcaccggagagcaaaaccgtggtgacggcgtgctatatttcggatgtgaacggctctgcggtgacgggcgatgagcttggcagcgtgatgatgtcgtatatcggtctgacgaacatttttaagggccttacgggcggcacgttcacgtttgacgatttgcgattgagcgacccgacgatgattttctgctcagaagatgtgcgcgggcagatcatgcaggacgcgcagtacgcgaatctttcggcggtaaaaaacggccgtgtttacgccgtcgacccgaattatatgaattggcaaggcaagacggtgtacaacgcgtgcatcgacatgatgggccttgcataccccgaattgacggaggaaaactccgctgcgctggaactggattccgagctttcggaagcggaagcaacggcgagcccctcgcccgcgccggaatacacggcgattgaatccggcacggagggcgacgatgtgttcgcgatgcagcagcgcttagcggagcttggctatctgacggtggaatacaccggcatgtatggagaaatgacgatggaggccgtaaaggcgttccagaaagcgaacgggcttacggcgaccggagaagcagatgccgagacgctgacggtgctctattccgcggaggcaaaagccgcagacggtgcggaagccacggcgacaccggagccggaatcggaaacgagcacggcggagggcgccgtgacgacacacgaaaatgcgtaaaatttgagagcttgaaagggcggctttgccgcccttttttgtattgactttttctccgcttttttttataatcagaagcaagatgcgcttttgcgcgctattgtattgagtttggggcgcaggctccgggggaggaaacatgtttttcacaagagacaagagcttttacaaaacgctcgtcacgctcgcgataccgattgcgctgcagaatgccgtaacctttgcggtcggccttgcagataacgtgatgatcggcacgctcggcgacagtgcaatttccggcgtgtatgtgggcagccagctgcagacgctgctgcaaatgttcatcggcggcattgagggtgctatcctcattttggctgcgcagtattggggtaaacgcgatacaaaaagcatccgccgcattgcggccatcggtgtgcggtttgctttgctcatcggtttggttattacggtgacggcgtttttattgccgtcgcagatcgtatcactgttcacgagtgatgcttcggtcattgaatcgggcacggtttatgtgcgcgtggtgagcctttcgtacattttcttctgcatttcacaggtgatggtggcgacgatgcgcgcggtggagacggcgaagatcggtctttacgtgtcatttgtgacgctcattgtgaacgtcatctgcaactatattttgattttcggtaagcttggcttcccggcgctcggtgtgaccggtgcggcggtggctacgctgttttcgcgcatcattgaagcggctgtgatggtcgtttacgtgcgctgcatcgataaaaaactgaagcttcgctttgccgacctcttaaagcgcggcggcgaattgacgcgcgatttcctgcgctacggtctgcccatcatgggagggcaggtcgtatggtcggtgaatatgctggggcagacgatgattctcggccgttatgacgcgggcgtcattgcggcggtgagtatcgcgaatatgttgcacaacatgatgtacattgcaatgaacggcctttcgagcgcggtgggcattatcaccggcaagacggtcggctccgggcgcatggacaaaattcgcgagtattcccgcacgacgcaggtcattttccttggcctcggcattctttccggcattgcggtgcacttcctgcgcgacccgttcatcgggctgtacggcgcgagcgacgcggctgtggcgtatgcgcgtgagttcatcaatgtcatttccgttacgattatcggcacgtgctatcaggcggcgtgcctgttcggccttgttaaatccggcggcgacatttcgtttgtcttccgcaacgacacgatcttcgtgttccttgtggtgctgccgtctgccattatcgcatcttacctcggtgcgccgccttgggtggtttttgcgtgcctcaaatgcgaccagatcttaaaatgcttcgttgccgtggtgaagatcaaccggtataactggatgaagaacctgacgcgcgagacgaacgaagtgtaaaactacgacttgaaggaaattttcatgaagcaatttcgcggagccttgctcctgacgatcaccgcccttatttggggcacggcgtttgtagcgcagagtctcggcatggaccatttgggcccgtttgcgtttaacggcgtgcgcaatttcattgccgcgctggcgcttttgcccgtgctgctgtttatgcagcgcaaagcgccgaaaaaaacgcagacggacgaagagagaaagcagagccgcaagaccctgtgggtgggcggcgtgctgtgcggatcggcgcttgccgtggcctctaatttgcagcagttcggcatcagctttacgacagtgggcaaggccggatttttgacggcgctttacatcgtgattgtgccgatactcggtttgttcctcaaaaaacgcgtgcccgcaacggtttgggtgagcgttgttattgcggcggcgggcacgtatttgttgagcgtgcaggagggcttcaccatcgcgccgggcgacctgcttgtcattttgtgtgcgctgggcttttccgtacatatcctcatcatcgaccacttctcaccgatggtgaacggcgtggcgctttcgtgcgtgcagtttcttgtctgcggcattctttgcacggcagcggcgctgtttacggagacattcacgtttgcggacattttaaaaagtgcagggccgctgcttttcacgggcctgatgtcgagcggcgtgggatacacgctgcaaatcttggggcagaaggataccccgcctgcggtggcgtcccttatcatgagccttgaatctgtgtttgcggcgctttccggctggctggtcctcggccaaagcatgaacggacgcgagcttttgggctgcgttttggtgtttgcggcggtcattttggcgcagatcccgcttgaagcgctgaaaaaggaaaaagcggtgaataagacggcataaagtaaattggggcatttccgggaaccgtttcgcggttttctgcgggaatgcctttacttttgtgaattttatggtatagttgtaggtagaaactctttgggtaaaaacgcgcacggcacaaggccggcgctttactgtgttgaaaggatgaatattcaaatgcgtattatcaaaacgaaaacctatgaagaaatgagcgccattgcagccggcatcatcggcggtcaggtgcttttgaagccgaactgcgtgctgggtcttgcaacaggctcttcgccgatcggcacctacaaagatcttgtaaagagctatgaggacggcgtgttggacttttccgaagtgcgcaccgtaaacctcgacgaatactgcggtctggacggtacgaacccgaacagctatcgctatttcatgaacgacaacctttttgaccacgtgaacatcgacaaggcgaacacgcatgtgccgaacggccacgcagatgaccttgaagaggaggctgtgcgctatgagagctttattcagtctctcggcggcatcgatctgcagctgctcggcatcggccacaatgggcatatcggctttaatgagccgacggacaacttcccggcgacagtgcacaccgtacagctgacggagagcaccatcaatgcgaactcccgtttgttcgagcgccgcgaggatgtgccgacgcaggccatcaccatgggcatcggcaccattatgaaggcgaagaagattcttctcatcgcaggcccggataagacggagatcgtcgaaaaggcttgcttcggcaaggttacgccggaggtgccggcttccgttttgcagctgcacccggacgttacggttatcctcagcgcggaaaagtaatctcgtttcggcaaaattgaaattcggtagttgactttaaggttaacttatgctatgatgtagacagcaaagccgcaggaagcggtaacggtcaaaagaccgcgcggcgaaacgccgtttgaaagtattttaaagccactttaaaaaatagaccacgaaggtcttttcgctcggtatgggcggaatgcttcgtggtctttttgtatctgggagggtatttcaatgaaccgtacaaacagcaaattttccgttaaaagccttgtgctcggtgcactttttctggcgcttgcgttagtactgccgttcttcaccgggcagattccgcagattggcgcaatgctgtgcccgatgcacctgccgatcctacttgcaggcttcgtatgcggcggcccggtgggcgcggttgtgggctttatcgccccgctgctgcgcatggtgatgttcggcatgccgccgttctacgtcgccatcgctatggcgtttgagctgctgacatacggacttgtaagcggcatcatgtaccgcaaggtgttcaaaaagcagaccgtcggcacgctgtacggcagccttttgaccgctatggtcgcgggcagagttgtctggggtatcgtgaaggtgattctcagcggcatcgcggcggacgcgggcgcgttcacatttgcggcgttcatctccggcgcactcttaaacgcaatcccgggcatcgtggtgcagcttattctggtcccggccgtcgtcgtcgccttgcagaaagcaaagctgatagaagcaccgagcgcggaaaaagcgtaagcactatgggttccctgaaagggcggcattgccgccttttttcatgcacaaagcttgcactcacctcgccatcgtgctatgataatcccaaagagacgaaaagcgggatgggggaaatactttgtttacggatatgtttggcaaaacctggtataagggcaatttgcacacccacacgacgaactcggacggcgcgtatacgccggaagaaacgattgcattgtataaatcaaaagactatgatttccttgcgctgaccgaccactggttccacggtgaggggcggcaggaggaaaattttctcctcttaaacggcacggagtttgacgtgggcagtaccgtgcaggagggcatttaccacatcgtcggcatcggcatggagaaagcgcctgcgcttacaaaacgcgcgccggggctttccgtgcagaagatcatcgatgagatccataacgtgaacggcattgcaatcttggcacaccccgcatggtcgctggatcgcgcttcggaggtcgcaaagctgtacggcattgacgggtgcgagatttacaacactacttcgggcctgccgtggaactgccgtccgtattccggtgtgtttttcgacgaaatggcgcttttggggcactatttgccgtgcatggcggcagacgatgcacaccactacacgggtgacgagacgcgttcgtacatcatggtgcaggcggatgagttgacgcgcgagggtgttttggcggctatccgtgcaaaccgcttctacgcaacgcaggggccgaatttccgtgttgaaattgaaaatggcacggtcacggtgcatacctcgccggtgcaggaggtcgtgtttttcaccgataccgtttgggcgggtgatcgcgcaacggtgggggaaagtgtaaccgaagcgacgtataaagtgaagcctacggacacgttcgtgcgcgtggagctgaaagacaaagacggcaactgcggctggtcgggtatttatcccgtcaacaaaaagtaaaaggaaaaggtctgctcaccaaaacggagcagacctttttgcgtatgaatttaaagcgtgatttgcatgccgtcgttcacgaatttgacgggcagcggagcgagcgtttccgcaagctgcatgacgttcgggatattccacggcgcgtagtggttgacgagcacctgctttgtgggacaggcggccaaaacgggcgcataatcggtcgccgggaagtgcgcggcctcgcagatgacaaattcggtcggcttttccttggcgattttcggaaaatcgacgttgggatgttttaagtcgcccgtgaacagcacggctttgccctcggcttccacgaaaaaagcatgggaatccgggcaatgctgtgtgggaatggcggtgacttttaaatatccgtcgtcgaagatcgtgccgtctgtgacctttttaaagcgcaggtcgcgcatttcgcagtggtttgctttgagccatgcacggatggcctcaacgccatccaagttcggcaggcagatttcggggtcggcggttttaaaataccagctgataaggtcgacgaacgagatgagcccgtttgtatggtcgccgtgcacatgcgtgatgaagatgcccttgacgtcctctacctcgatgccgcgtgtgcgcagggcatcgatggcgttgacgcccatatcgatgaaataatatcggccgttcgtttcgatcaaggtgcaggagcagcggcgatttgcctccggcacgccgtggcttgcgccgagaaatgtgatctgcataaagtttaaattcctttcttttcaatacttttagtgctttctgagattttcaagaatttgcaccgcaaattctttggaagaccccctaattgggtctcccacactctaacagtccgctggactgttagagctcccatcctgatttttaggtaggcaaaagagtttcgaactctgcggagttcgaccaaaggtgttgcctttggatttcacgaccgaaccataggttcggtttgaccttcatttgaaaaaaggtcgatcaaaaacttttgcatcgcttcgctgtgttcagtttaacacgtttatgtatcgactgcaatgcgccgaattcacagattttcgttttcgtttttgtctatcacagctttagggtttccagcagacggttcgtttctcgctctacatggtcgtagtcgacgaacgggcggtagatggtttcaatcgcgtcatgtgtgcgcttgcagagcctgagctcctctacggcctgcgcagtcaaggtctcggcctcctgcatggcgaacgggatgaagtccgaaagcgggctcaaaaggaactcgtttaatgtgctgcgggtatcgtccgcggcacacagcatggtgtcgccgatgcgcacgcactgcggtgcttccggcgtgagcggatgcaggaaaatttcagtctgcgtattctgcacgagcttcatggcttcatttaagaacaccgcgcccaaaacgccgggcaggtacacggtgttttcggcatcctgtacttctcggaaatccgcaacgccggcgggcgtggggctcgttaaaaacagtgtacgcggtgtgccttccttcggcagtgtgaagccctcttttaaaaatgtacggatcatggtaaggtcggcagaccttgcggcttcgcttacggcggcacggcgcaggctgcccgcggcggaaaggcacgcgaacgcgtttttgtagtgcgcgcggttttcttctgcaaggacaaaaagctcttcgcggcggcgtttgaagacctctttgtgcaaaaaccgtccgagatccagcgtttcgccgtcgatccccggcatggcggggtctatggtgtgcggcgcggtgccgtccagtaagacgagccgccgctgcgggatacgcacggcgtcaaagctttcggggtcgcttgcgcagcgaaattcttcgacggtaaacccgtttgcccgtgcaatggcggtgcattttttcatcaatgtgctttttcctaccccggggccgccctttaaaacgtaggtgtagtgcggctcgctccacggcggcacgatgctctcaaaatgcccgatgaatccgcgcccggtgttggcgcccggaaaataccttcttttgccgtttgacataggaaaccctcctcatttctcatcggtgagttatatgcgaaaagccgttaaaatagtcgccgcggacaaaacaaaaagtggaaaacccgtgtggaaaatggctttcccacacaagaaaaaccgcgctatgtcacgaattttttacaatctcgccgcggtgctgcgtattgaattgcgcgcgcgcctgtggtatcattaaaagtatatttgggtaattttgcggatatgtaagagctgccgaaacaggcggcatttatgcggtaccggtatacgatgcggaaagggtaccgcagaaaggatgaatcaacatgatgagaatcggtttggacgttggttccacgaccttaaagtgcgttgttctgaacgagcagaacgaggtgcttttcaaaaaatatgagcgtcatctttcgcgcatcgtggagaaatccgttgagatgctgcgtgaagtggcagagcagtttccgaaagaaaaggtgcttttgagtatttccggctcggccggtatgggtcttgcagagcgcagcgacattcagttcgtgcaggaggtatacgcgacgcgcattgcggtgaaccgccttgtgccgggtacggatgcggtcatcgagcttggcggcgaggacgcgaagattttgttccttacggacggcaataacgcctccggccttgaggtgcgtatgaacggatcctgcgcgggcggcaccggcgcgttcatcgaccagatggcgacgcttttgaacatcaccccggatgcgctcaacacactttcgaaagagcatgagaagatctacaccattgcttcccgctgcggcgtgttcgcaaagagcgatattcagccgcttttaaatcagggcgcgcagaaaaaagacgtggcggcaagcattctctacgccgttgtgaaccagaccgttgcgggtcttgcgcagggcagagaaatcgcgggcaaggtcgtatacctcggcggcccgatgacgtttttaagcgagctgcgcgtggcgtttgataagacgctcggcattacgggcatctgcccggaaaattcgctgtatttcgtcgcgttgggtgcggcgtttgcggcggacggcaatgagacgacgcttgcggagatcatcaaccgcattgcgcattacacggcaaaggaagaataccgcgcctgcccgccgctttttaaagacaaggcggattacgaagcattcacgaagcgccaccttaacgccggcgttaaggtgcgcgacacactggaggacggcgagccggtttatatcggcatcgatgcgggctccacgaccgttaaagccgttgtgacggataaggacggcaatattgtttgttcgcgctatatgtcgaacagcggcaaccctgtcccgctgatgcgtgaattcctgcttgaagtttacacgcgtttcccgcaggcgaagatctgcgcctgcgcggcgaccggctacggcgaagacatcatcaaaaacgcgttttccgtcgattacggcatcgtagagacgatggcgcatttctacgcggcgcgcgcgttcaacccgaaggtcgatttcatcatcgacatcggcggtcaggacatcaagtgcttcaaggtcgaaaacggcgtcatcgacgatattttcctcaacgaggcttgttcctccggctgcggctcgttcctccagacgtttgcgggtgcgctgggttactccattgaagattttgcaaaactcggtctgtttgcggatcgcccggtcgacctcggctcccgctgcacggtgttcatgaactcctccgtgaagcaggcgcagaaggacggcgcaacggtggagaacatctctgcgggtctttccatcagcgttgtcaagaacgcgctgtataaagttatccgtgcggtcgattccaaagcgatcggccgggagatcgtcgtgcagggcggtacgttcctgaacgacgccgtgctgcgcgcgtttgagcaggagatcggccacgatgtcatccgcccgaccattgcgggcctgatgggtgcatacggtgctgcactgtatgcacacgaaaaagcacaggctgcgggtaaggcgacggagctttcgacgcttttgagcaaggaagcgctcgaagaattcacccacagcgtaaaggccatcacctgccgcggctgctccaacagctgcaagttgacggtgaacaccttttccggcggacgcaagttcatcagcggcaaccgctgtgaaaagccggtgacgggcgtgaaatccaccgaagcgcagtacaacatgtttgaagaaaagcgcaagctgctcgcgcgctatacatacaaagatacgggcaagccggtcatcggcattccgatgggcctcaacatgtacgagcttttgccgttctggtataagtttttcacaacgctcggctacgatgtgaaaacgtcaccggcgtcgaaccgccagctttatttaaagggtcagcacaccattccgtccgatacggcgtgcttcccggcaaagctgatgcacggccacgtggaagcgctgcttgacgagggcgtggacgcggtgttctacccctgcatgacgtataactttgacgaaaacctcggtgacaaccactataattgcccggtcgtcgcctattacccggaggtcatctcctccaatatccagaaattaaaggacaccgtcttcatcggcgattacgttggcctgcaccgcagacacgacttccccggcaagatgtacgagattttacgccgtcacttcccgaacggtacgttcacgaaaaaagacgtgaagaaagcatccgacgcggcgtatgcggagtatgacctctacatgcgcgccgtgcgtgccatcggcgacaaattcctcgcgctcgccgaagaacagcataagcccgttatcgtgctggccggtcgtccgtatcatgtggacccggagatcaaccacggcattgacggcctcatctgcgactgcggcgcggtcgttgtgacggaagacgccgttgcgtgcaaggagaagaaattcccgacgaaggtcctcaaccagtggacgtatcactcccgtctgtacgcggctgcaaagtacgttgtagaccgtgcggataagcgcgtgaacctcattcagcttgtctcgttcggctgcggcgtggacgccatcacgaccgacgaggtgcgcggcattctgcacgacggcggcaaaatctacacccagctcaagatcgacgagatcacaaaccttggcgcggtgcgtattcgtctccgcagcctgtttgcggcgctggatttacagtaagggaggcgcacgaatatggcttttaccgatcgcgttgaatttacaaaggaaatgaaaaaagagggttatacgatccttgcgccgaacatggcgcccatccatttccgtttatttgaaaacctgttcgcttcttacggctacaacgtggagattctccagacgcgcggccgtcagattgtggacgagggtctgaaatatgtccacaacgatacctgctacccggcgctgctcaccatcggccagatgatggacgcgctgcacagcggcaaatatgatctgcataaaacggcgctcatcatcacccagacgggcggcggctgccgtgcttcgaactacattcaccttttgagaaaggcgctggaaaaagacggcctttcgtatattccggtcatttcgctcaacatgtccggactcgagaaaaacagcggcttcaagctgacgctgccgatgatccgcaaggcgctgggcgtgcttgcgtacggcgaccttttgatgctgctgcacaaccagacgagaccgtatgagaaagaggcgggcgcgagccggaagcttgtggacgattggacaaaaaagctgaccgatatgttcgcaaaggaaaagggctactccgcaaaggagatggagacgatcctgccgcagattgcggaggattttgcgaacgtgcctgtgaccggcgaaaagaaagtgcgcgttggtgttgtcggcgaaatttacgtcaagtattcgcccatcggcaacaacgatctggaagagttcctgttcagccagaactgcgaaacgatggtgccgggtctgcttggcttcatgctgtttaaagtcgataaccgcatggaagatattaagcttttcggcggcagcaaggcgaagtttgaggttgtgaagatcttctttgactacctcgtcggcatcgaaagccacgttatccgcgccgtagagcacgcgaacaccgtttctaaccgcttcactgtgccgtcctcgtatgcgcacctcaaaaagctcatcacaggcgtcatcggctacggctgcaagatgggcgagggctggctcttaaccgcggaaatgatggagcttattgaaagcggctacccgaatatcatctgtgcacagccgttcggctgcctgccgaaccacatcgtcggcaagggcatgatccgcagcctgaaaaacctgtacccgaagtcgaatattgtgccgattgattacgatccgggcgcgacgaaggtcaaccaggagaaccgtatcaagctgatgctggcggttgcaaaggaaaacatggagcaggccgaaaaagagaacgctccgaaagcggaagaataagataagctgaaaaacgcctgtcctttttgcgaggataggcgttttttcgatagataacgtgaaacggcggttaaaagtctttgattaaactttcttcagaaagtttatggggcctcggggcaaagcccagaggcgcgctccgcagagcgcgaaatctttttgcctaacgaaaaactaagactgttcagacgtagggaacccggttgcatggattcactaaagggttcgtacgcgaaccctcagaaaataagtttatcataaaactatttcctcaaaaccggcagcttctccaacagcgggagtaaaacctgcagcaaaagcccggtacagatgccgcagacgaccgaatacagcgcgagtgcgggagtgtatcccagcgcgccgaagccggtcagccatagcgcgacgagcagctgtgcgaggttgtgcccgaacgcaccgcagacaccgatgaagaccggcgtgaattttgtttttttccacagtatgcccatgatgagcgtgctcaaaagcccgccgcaaaggctcatcagcccggcggaaacaccgcgcgtcaaaaacgcaaacagacccttgattgccgcaatgaacagcgccgcgggcaggccgatagcgccggcggcgaacatggtgacaaggtttgaaagcccggcttttgcgcccggcggcatgcccggcagcgggggcaggagattttcgaggattcccagcaccagtgccagtgcacccaatagtccgatgagcgcgatgtgctctgcttttttcttcatggatgtcctttcgattttgaggtgtttttttctaaggctcgcgttggctcgccctttcaagggaccccctaattgggtcccttgcggctaaactgtccactggacagtttagcctatcctcctgattttgaggtaggcaaaaagatttcgccatttgcgaatggcgactcagggcgttgccccgagacctcacgaccttttgaaaaaggtcgacgaaaactttattcgtcttgtttcacatcacagcagtgtaagctgttcaacttctacggggatcaagtggatgacctcaagtccctcttttttcgctcttcttacagtataagcggtgccgccgcgtttggcggcagggtcgcgcagatagcagacgcagtaaccgctgcgcgctaccatggcgtcgtcacgccgcagcatacagtccggcgtataccgttcaaaaaggaattccgcagtatcggcctgctttaaaatttcacggtagcggcgcttttccgcaaaatgccagcggtcgctttgccctttgcacggcaaaatgaggtgcagccgcacgggcagagcttcgcgagttttcaagacggcttccgccgccatggtgtcaaatcctcttgcgccgccggtgtaaaactccgtcacgcctttttctgcatataatctttgaatttcggagagcagcgccgcgcggagcggttcccggtcttcgggcggaatttctcggtgtcctgtaaagcagcaggcatttttccgcatggcacagcctccttttcgtttgatactcatagtttacagctttttcataccgctgtaaagatgtacggtggactttaaaaccaatctgtgctaaaattgttccgaaactcaaacggaaggaatttcgtctttatgaaagcaaacgtaaaacgcccggcgcgtttttcttttaaaactattacggaaaagaaggcgaaacatctgacgctgatttttgttgcagttttgtttttggtgatcgtcgtcttggcgctgtttccgcttttggaccgcgaagaagagcggtacgaggtgacgacctacgctatgggcagctacgtgcagcaaaccgtttacggtgaaaaccgcgaggacgcggccgtgaaagcggcggacgcggtggaagcgctggagcagaaaatctcctggcgtgtggcgaacagcgatattcaaaagctgaataacaacgtgggcaaggactgggtgacgctgagcgatgaaacgctgaacgttttaacgcaggcgcagtcggtttcggaaaaaagcggcggcgcatttgacgtgaccattgcgccgatctcgcgcttatgggactttgatgacgaattgaacgaagtgccggacagtgacctcatcacatccttactgccgtatgtgaattactctttgctgcgcatagacgaaacggagcagacggcgtctttgaaaaatctcggcatggcggtggacctcggttcggtcggcaaaggtgcggcgtgtgacgcggcagtcagagcctacgaagaagcgggcgcaaaagcggctatcatcgcggtcggcggcagcgtgggcgtatacggcgaaaaaagctccggcaagccgtggagcgtggcggtgcgcgacccgaacggtgacggctctctcggttcggtaacgctggcggagggttttgtctccacctccggcagctacgaaaaatactttgagcaggacggcgttttataccaccatctgctcgatccgaaaacgggctacccggcagaaagcggccttgtttccgtgacggtcgtcgcgaaaagcggcgtgctttccgatgcgctttccacagcgtgctttgtgctcggcagagaagacggcatgaagctgctggaagaattcgatgccgagggtattttcatcaattcagacaacaacatcacggtgacggacggactgaaagatcgcttcacgctaataagctgcgattacacgcttgtttcctgaaagaggggctgcgatggaaaagagaaaattttcatggaaagaagcgctcctgctcgttttggtgcttgctgtggcggcaggcgtgtatctctatgccaaaacgcgcccgaagggggcagaggccgtcattgagcaggatggcgaagtgtgccgccgcgttgtgctggccgatttaaaggagccattaacgctggaagtgaacggcgcggtgattgagcttgataaagacggcgcacatttcgtttcgagcccgtgcccggacaaaatttgcgtgaacaagggaattatcaagcgtgcgggagaatctgccgtgtgcctgccgcagcgcgtgagtgtgcgcatagagggcggcgacagcgagatagactccgtaacgggataaaagaatatgaccatagaaaaagagacgcaccaaaaggtacgcctctttttctgaagggataaaaaatgaaaaatataaaaggtaaggtaaactcaaattgaatgtgcaaaggcttacttctttgcgggcggcttgatcttgccgatggccgtaatgatgatttccgcaacctcatcaatatcgaattcggaagaatcgatggtgaggtgataattcgagagatcgtcccagcgcttattcgagtagaagttgtagtaattcgctctttgcttatcgcgttttgtgataaaatcggagaccttcttctcatcgcacagacctttgctcaaaatgcgcttgatgcgcgcttccttgttggcgtggatgaatacgcggaacacgttgtcgtactcgcgcaggatgtagtcgccgcagcgtccgatgatgacgcacgggcctttatccgcagccgacttgatgatgtcgctttgaagaataaacagcttatcgttgatgggcatatcgttgatgccggtgatacggcttccgaaggtgtagtttcccatcaccatggaatacaaaaggctgttgcccgctttttcgtccgccttttcaaagacttcctcgctcagcccgctcttttttgccgccatggcgatcagctgcttgtcgagaagggggacattcaatttttccgccagacgctcgccgacctcgtggccgccgcttccgtactgacgcgcaatggtaataatcggtaacatagactcgcctcctcgggtttctcaacataaagtgtacaaaacacccgttccgcccatctctatgcgataaaaccggaaaggggattgtaaaaacactctaaaatgagagaaaatacttaaatgatttgtatgtattttctataaaatatcttactccacttttcccggaatgtcaacaggcaatagaaaaatttcttcgtgaaagaaataaatcgtggaaatacttgaaaacagggccggatatttatataatttccacatggaataaaagcgggaaggcgcatacggcatggcagttttcattcggcattcaccgctttttcacaaaagtgcgttatgatacaggtatacggagcggaacagttaaaaggaggccttgtcatgtacagaattttagtcgtggacgatgaagcgaaaattcgcctgctcatccgcaaatacgcggagtttgaggggcacgaggtgacggaagcggaaaacggcatggaggcggtgcgcctgttccgcaaaacgcccgatgcgttcgatattgttatcatggatgtgatgatgccggagcttgacggtttttcggctgtggcggagattaagaagattgcatcgccggccgtcatcatgctttccgcacgcggcgaggagtatgataagatccacggctttgaactcggcgtggacgattatgtcgtgaagccgttctctccgaaagagctgatgatgcgcgttgccgctgtgatgagccgtgtgcagcgcaccgtaataccgaagcacgagttgttccgggcggagggcctgacaatcgattttaccggacggatcgtcacggtggacggcgtgcgtgccgatttgtctccgaaggaatacgacctgctgttttacatggtcaacaaccgcaacatcgccctcacacgcgaaatgcttatcacaaatgtctgggggtatgatttttacggtgacgaccgcacgctggatacgcacatcaagctgctgcgccgcagcctcggcccgtacagtaaattcattgtgacactgcgcggcgtgggctatcgttttgaaacgcacggcgcataaggacggcgggactatgggcgaacagacagtaaagaagcataaattcaaaaaatggcgcaagccgggcatacgcatgcaggtcatgctggggttcgtgctgtttacggcggtcattgtgacgttgctgtggacatttcagatcacactgctcaacacattttataaagccatcaaggtcaatgaggtgcgcagcgtggcgaaccgtgtggtggcgatgctggacgaaagtgcttccgcgagcgattattttgaagtgacgcgctcgacgaatatttctatccttatttccaacagcgacggctcaaatgtgtcgttttccccggcggcgcgcggtggcgtgctggagcgctttgattacctcgattgcaagcagcttttcaccgaggtgaaagcggcgggcggcagcgtgatggacgacaacatcacagacccgacgagcaccatagaacggcaggaccgcacgatcatttacgcgcagacggtcacgctttcgagcgggaacgagtatcttgtgctgctgtcctgcgacgtgatcccggttgattccacagtggaaacgctgaaaatacaattgtggtgtctgacgggcgtaatgattctgctttcgttcgggctggcactgtttatctcttcgcgtctttcaaagcccttggaacagatgaacgaatctgcaaagcagctgggcgagggaaaatatgacatccgtttcccggaacagggcgcaagagaggtggcggagcttgccgcgacactgaactatgccgcggcggagctgagcaaggttgaagatctgcgccgcgagctgatcgccaatgtttcgcacgatctgcgcacgccgctgacgatgatctccggctatgccgaggtgatgcgcgacattccgggcgaaaacacgccggaaaacgtgcagatcgtcatcgacgaagcgaaccgcctgacaggcatcgtcaacgaccttttagatctctctaaattacaggcgggcgcattgacgctgacggtttccgaattcaatttgacggaggatatccgcaatacgctgcaccgctacgacaagttggcggacttcagcttcccgttcacgtatgaccgcacggtgtatgtctgcgccgatcagctgaaaatttcgcaggtgctgtataaccttgtgaacaacgccatcaactattcgggcgggaacaagaccgtgtatatcgaccagaccgtgacggaaagcaccgtgcgcgtatctattcgcgatacgggcgagggtataccggcggataaattgcagtacatctgggatcgctactataaggtcgataaggagcacaagcgcgcacaggtcggcacgggattggggctttccatcgtgaagaaaattctggacctgcacggcgggaggtacggcgtcgcgagcgtggaggggaaaggcagcacattctggtttgaactgccggtgctacgtacggaatctttgattctgccggaaccgccgacattaccggaacaaaaagctgacgtgaaacggggcgaataaagttttcgccggcctttttcaaaaggctgcggaaacccggtcaacgggtttcccaaacggcgttacgaaacgtcgtcagaaagatgttcacagtcggctgaattaaactgaaaacagcaagcgtaaacgaactaaaagcgtacccgaaggtgatttgggcgcgcttttttcgcacagagaacgaaacacgaaattcgtatttgtgaaagatgtatcaaactcaaaagaggcccgcgcggcttttgttttactttctgaaaaagccgtaaattccgatattttcatagagaaaaatcgcgaaaatgcttgataaaaagatatcgatatgatagaatttattaggctgagtatgtaccccgtgagtggggaaaggggaaaactgcgtttcgcccctttgttttcatgtaactcagaagatcccgcccgcggaggaacattgtgctccccatcgggcacagcacaggaagggaagtgatccgggacaatgaaaagcaaaatcaccgtgattggtgccggtagcgtaggcgcaaccattgcatatacgctttccaacgaagacatcgcaacggagattgttctgatcgacatcaacaagcaaaaggcagagggcgaagtgatggatatcattcagggcacctgcttccgcgacccgatttccattaaatcgggagattacgaggatgcaaaggactccaacatcgtcatcattacgtccggcgtggccagaaaacccggtcagtcgcgccttgaattgacgcagacgaatgtcgacatcatcaaaagcattgcaccgaacatcgcaaaggccgcaccgaacgcgctgtacatcatcgtcagcaatccggtggacatcatcacctacgtgttcatgaaaatctccggcatcccggaaaaccagatcatcggctccggcaccgcgctggataccgcgcggctgcgtttcggacttgccagccactttaacattgcgcagaagaacattcatgcctatgttttcggtgaacacggtgattcttcctttatcccgtggtcgtgcgcagaggtttccggtgcgaaactggacgactatgtggagctgatgcatgccctgcccgtggacaaggacgccatggcggagtatgtacataaatccggcggcgagatcatcaagaacaagggcgccacgttctacgcggtcacggtttccgtgtgcagattgtgcagcatgctgctttccgcatacaattccatcgtgaccgtttccaccatgatgcacggtgaatacgggttagaggacgtgtgcatcagcacactcgccattgtgggcccgaacggcgtgcagggcaagctgcctgtgaagctgacggaggacgaaatgcaaaaactccacgcttccgcagacaagctgaaagaaaccatcggtcaaatttattttgaagcataacccaaaatcaatttatagaaaggatgacaggagtagctatgaagtacagctattatccgggatgtaccttgagaacgaaggcaaaggatcttgacgcctatgccagagcttccgcaaaggcgctcggatttgaattggaagaaatcgaaaactggcagtgctgcggcggtgtctacccgctcgggtccgacgagatcgcaacaaaactttcctccgtccgcgctttgaacgaagcgaaggaaaagggccaggacctcgtgacgctttgctccgcatgtcatcatgtcatcaaaagagtcaacgacgacatgagaaacgtggaggacatccgcacgagagccaacaactacatgcagcttgacgagccctatgccggcgagacgaatgtgctgcattaccttgaagttctgcgcgaccgcgtgggctttgacgaactgaagaaaaaggtcgtcaacccgttaaagggcagaaagatcggcgcatattacggctgcctgctgctcagaccgagcaccgtgctggcctttgacgatccggaaaacccgcagatcattgaagacttcattcgtgccatcggcgcagagccagtcgtatatccgtaccgcaacgagtgctgcggcggctatatctcccttaaagaaaaagaaatgagcggccgtatgagctgcaatatcgtagacagcgcagccggtgcaggcgcggaaatgctcatcacggcatgtccactctgcatgtataatctcaacaagagcggcagcggcaagatcccggtgtattacttcaccgagcttctcgcagaggcccttggcgtgaaagaggaggcgttaaagtgagcatcagcaaacaggcggagcagatccgcgagatcagcggcgtcaacccctacaagtgcatgaagtgcggcaaatgttccgcatcctgcccgtcgttcaacgaaatggacatcaaacctcaccagttcgtttcctatgtgctgaatgacgacattgagtcccttgtgaattccaagtccctttggaagtgcctttcctgctttgcctgcattgagcgctgcccgagagacgttaagcccggcaagctcatcgatgcggcaagacagcttgtcgtgcgccagcgcggtgaagcatatcttacgccggacgagatcccggagcttttggatccggatctgccccagcagctccttgtgagcgcgttcagaagatacaggaggtgatagcgtgcagagaattggtgtatttgtgtgccattgcggcagcaacatcgcagctacggtagatgtaaagaaagtcgtagaaatggtcagtcatgaaccgggtgtcgtgcacgcggaagattatcagtacatgtgctccgaggtcggccaagcgaagatcatcgaagccatccgcgaaaaacacctgaccggtcttgtggtttgttcctgctccccgcgtatgcacgagacgactttccgcaaaacggcggaaagagctggcctcaacccgtacatggtcgagattgcaaacatccgtgagcactgctcctggatccacaagaacatggaagaagcgaccgaaaaggccgtcatccttgccagagcggctatcgcaaaggtcaatcttgacgcgccgctgttcccgggcgaaagccgcgtaacaaagcgcgcgctcgtcatcggcggcggtattgcaggcattcagactgcgctcgacattgcagacgcaggctatgaagtcgatatcgttgagaagacccccagcatcggcggtcgtatgagccaactcgataagacgttcccgacgctcgactgctccgcatgtattttgaccccgaaaatggtggaggcttccgcaaacgagaagattcatctgtatacatacagcgaagtggagaaggtctccggcttcgtgggcgatttcaccgtggacatccgcaagaaggcgcgcagcgtcgatatgtctaagtgcaccggctgcggtgtctgccaggagaaatgtccttccagaaagaccccgagcgaattcaaccgcggcttgaacacgagaagcgctatttataccccgttcgcacaggcaatcccgaacgtcccggtcatcgaccgtgaagcttgcatcaagttcaaaaccggcaagtgcggtctgtgccagaaggtttgtcaggcgggcgccatcgattacgagcagaaggatgaaatcgttaccgagaagtacggcgctatcgttgtcgctaccggcttcgataccatcaagctcgataagtacgacgagtacgcatacagccagagcaaggacgtcatcacgtccctcgagctcgagcgcatcatgaacgcggcaggccccacgaagggtcatctggagcgcctttccgacggcaagcacccgaagaatatggtgttcatccagtgtgtaggcagccgttgctccgataagcgcggtaagagctactgctccaagatttgctgcatgtacacggcaaagcacgccatgttgatccgtgataaatacccggacgtcaacgtaacggtgttctatatcgacgtgcgtacccccggtaagaacttcgatgagttctaccgccgcgccgtggaagattacggcgtaaattacatcaagggccaggtcggcaaggtcatgccgcagccgaacggccagctgcttgtgcagggcgttgacctgctcgacaacaagcagatcctgatggaagcggatatggtcgtcctcgcaacggcgattgagccgaacgcggacgtgcgccgcattgcgaccatgctgaccgccagcatcgataccaataacttcctcaccgaggctcacgcaaagctgcgcccggtcgagtccccgacggcgggcgtattcctctccggcgtatgccagggcccgaaggatattccggaaacggtcgcgcaggcaggcgcggcggctgttaaggccatcggtctgctcgcgaaggataagctgatgacgaacccgtgcaccgctaagagcgacgagctgctctgcaacggctgctcgcagtgcgcaaacgtctgcccctacggcgcaatcagctatgagacaaagctcatcaacgaccacggcatccgtgaagatcgccgcgtagccgttgtcaacagtgcgctgtgccagggctgcggtgcctgcaccgttacctgcccgtccggcgcaatggatctgcagggctttgcaaacagacagattcttgcggaggtggatgcaatatgtcgataacagcaaacgaagagttcaagccgaagatcgttgcgttctgctgcaactggtgcagctacgccggcgcagaccttgcaggcagcagccgcttggtttatccggcagacgttaagatcatccgcgtgccgtgctcctgccgtgtgaaccccatgttcatcctgcgtgcttttgaaaagggcgcagacggcgttatcctgtgcggctgccacccgggcgactgccattacagcaccggcaactactatgccagaagaagaatggcgcttctgttctccatgctcgattacatcggtgtggagcacggacgcacccgcgtggaatgggtctccgcagcagagggcgtaaagttctcccagaccatgaatgagttcgtggcgaagattacttcgctcggcaagaacgtcagactggaggatttgagatgcaggaaatgatcaaccgcgcaaaagagctgctcagcgacggcaccgtaaaccgtgtgctcggctggcgccgtggcgatatgtcctacaacccggagccgtcttactttgagacggcggaggatctggacgcaaacttcgtctacaacggcttctgcggcgcgaacctcagtaaatatatgatcgagggctcgaagcttgagggcaagacgcttgtcttcctgaagccctgcgattcttacagcttcaaccagctcatagcagagcaccgcgtagaccgtgacaaggcttacattatcggtgtcggctgcatgggcaagctcagcttcgagaagatcaaggagcagggcgttaagggcatcacgaatatcacgatcgacgatgcaaacgagaacatcaccgtggagacgctctacggcgaaaagacactcgcctataaggactgcatgctggagcgctgccatgtctgcaagggcaaggagcaccagattttcgacgagaccatcggcgagagccgcgacacaaaggacgcagaccgctttgcagaggtcgagaagattgaagccatgagcccggaagaaaagttcgctttcttccagaatgagctcagccgctgcatccgctgcaacgcctgccgcaatgtgtgtccggcgtgcagctgccgcaagtgcgtcttcgacagcacgaagttcgacagtgcacagaaggcgaacgtggactcctttgaggagagaatgttccacatcatccgtgcattccacgtagccggccgctgcacagactgcggcgagtgcagccgcgtatgtccgcagggcattccgctgcatctcttcaaccgcaagttcatcaaagatatcgacgaattttacggtgagttccaggccggtgtcgatccggaggcaaagagcccgctgacgagctttaccttcaacgacgtagagccgggcgttaccgggggaaggagataagccatgttcaagattgcaaaaagtaagctgcccgagctgctgaaagcgatcgcggcacagcaggagctgttcctgccggtgaacaacaacggtcaggtcaacttcgccgcgtggtttgaaggctgcaatgcagacattgaaacacttaagacggtgaaatctccgaaggacatgttcttcccgcagagcgagacactttacacggtcaaaaaagaacagcacaagctctccgttgagccgcaggcgcttgcagatcagaacttcgtcgcgttcggcatgaaggcctgcgacattcagggcattaaggtcctcgataaggtcttcctcgctgagccggtcgatacgttctaccgcgcaagacgcgagcacggcaccatcgtggcgcttgcttgccacgagccggaggagtcctgcttctgtaaggttttcggcgttgactgcgctgagccggacgccgatgtcgtcatgtggaacgcaaacgacacgctctactggaaagctgtaacggaaaagggcaccgccctcaccgaagcgctctccggcgtgctcgaaaatgccgacgcagcagacgaaaaggccgtggagaccgaacaggagaacatccgcgcaatcgtagagaagctgccgtacacgaacctctctctcgagggttggaacggcaacgtcaccgaagaaaaattcaactcccccgtttgggagaagctttataagccgtgccttgcgtgcggcacctgcacctttgtgtgccccacctgccagtgctatgatatcaaggactacgacacgggccacggcattcagcgttatcgctgctgggactcctgcatgtactccgactttacgatgatggcgcacggcaacaacagaacgagccagatgcagcgcttccgtcagcgcttcatgcataagctcgtgtacttcccggcgaacaacgacggcatgtattcctgcgtaggctgcggccgctgcgtggaaaagtgcccgtcctcgctcaatatcgtgaaggtcatcaaggcgtttgaaaaggaggctgcaaaccatgagtgatacctgtcattgccatgataactatgtaaaagacgttctgatcccgcaggtcggcgtcatcacggacatccgtgaggagaccccggacgtcaagacgttccgcgtcaatgcgccggagggcggcaagctcttcgagcatatgcccggccagtgcgctatgctgtgcgcaccgggcgtcagcgagggtatgttctccatcacctcttcgccgacgaacaaagaataccaggaattcagcatcaagaagtgcggtcagcttacagactacctgcacagccttgaggtgggcgatgagattaccgtgcgcggcccgtacggcaaccacttcccggtagaagacaaattaaagggcaagaacctgctctttatcgccggcggcatcggtcttgcaccgttgcgctctgtcatcaactacgtgctcgacaaccgcagtgattacggcaccgtagatattctgtacggttcccgttccaaggacgaccttgtacagctgaaggaaattcaggacgtatggatgaagacggaaggcgtgaacgtatatctcacgatcgaccgcgagcaggagggctgggacggccacgtcggctttgttccggcatacctcaaggagctcggcttcgatacaaacaaaacggcgctgctttgcggacctccgatcatgatcaaattctgcttagcatcgctgattgaaatgggcttctcgaaagaacaggtctacaccacgctggagctgcgcatgaagtgcggcatcggcaagtgcggccgctgcaacatcggttccaagtacgtctgcaaggacggcccggtgttccgctgcgacgagatcgacgagctgccgaacgagtattaagaaaggggttggcgtaacatggaaaatatggtaaatgtatattttttcggtaagaagtacagcgtccccgcagacctcacgattatgaccgctatggagtatgccggttatacgctgaaaagaggctgcggctgccgtcacggtttctgcggcgcctgcgcaactatctaccgcattaagggtgtgaacgagctgaagacctgccttgcctgccagacacaggtgcaggagggcatgtatgttgcaagcattccgttcttccccacagacaagcgtacttatgacatcaacgagatcaagccgaaccagcagatcatgatggagctttatccggaaatttacagctgcatcggctgcaacgcctgcacaaaggcctgcacgcagaacctgaacgttatgcagtacattgcatacgcacagcgcggcgagcttgaaaagtgcgcagaagagtccttcgactgcgtaagctgcggctgctgcaccgtcagatgtcccgcgggcatctctcacccgatggtcggcctgctggcaagacgtctcaccggtaagtacatcgagccggagagcaagcacctgacaaagcgtgttgaagagatccacgagggtgcatacgacgagctgattgagcagatcatgcagaagccgatcaccgagatgcaggagctctataacaacagagagatcgagaaataaggagggtatagccatgtttacaccggaaatgcttgcctctgtcaaaaaagtagaggcaaccagacaggaacgcctgggcatggaacccagacgtatgaccgcagaagaaaaggatgcccttctgaaggcgtaccatcctgattacagagaagacggcttcgataccattaagatcggcccgaacaagggtgagaaggtaccgaaggagcttggtcatctgctgcactccaacagccgtttgctccaccacccgatcgatctgacgaagatcgattacgacaccgacgtgctcatcatcggcggcggcggcgcaggtgcttccgcagctattgaggcggacaacgcaggtgcgaaggtcatgatcgtgacaaagctgcgcatcggcgatgcgaacacgatgatggcagaaggcggcattcaggctgccgataaagagaacgattccccggttcagcattacctcgacgcgttcggcggcggccacttcgctgctcgcccggaactgctgcgtcgccttgttatggaagctccggacgccatcaagtggctgaacgagctcggcgttatgttcgataagaccgaagacggcaccatggtcaccacccacggcggcggcacctccagaaagagaatgcacgcctgcaaggactactccggtgcagagatcatgcgtaccctgcgcgacgaagttatcaaccgcggcatcccggtcgtcgagttcacctccgctgttgagctcatcaaggacgaaaagggtcaggtagcgggcgctgttctcctcaacatggagaccggcgactacatggtcgcacgtgcaaagaccgtcatcatcgccaccggcggtgcgggacgtttgcactaccagaacttcccgacctccaaccattacggcgcaacggccgacggccttgtgctcggctaccgtgcaggcgctccgctgctgtatcaggataccattcagtatcacccgaccggcgttgcgttcccggcacagatctacggcgcactcgtaacggaaaaggttcgctccctcggcgcaatgctcgtcaacgtagacggtgaagcgttcatgcatccgctggagacccgcgacgttgctgcggcttccatcatccgtgagtgcacagaccgccacaagggcgttaccaccccgctgggttccggcgtttggctcgataccccgatgatcgagcagatcggcggcgagggcaccattgagaagcgtatcccggctatgctgcgcatgtacctgaactatgacatcgatatgcgcaagagcccgattctcgtttacccgacgctccactaccagaacggcggcctcgagatcggcggcgacggattcacaaaggctatcggtaacctgctcgttgcaggcgaggctgttggcggcattcacggccgcaaccgtctgatgggcaactccctgctcgacatcatcgtatttggccgcaacgccggtaaggctgctgccgcaaaggcgaaggagaccgagctcggcacccttaccctcaagcatattgaggactatgcagaagagctgaagagcgcaggcatcgaatccgaggatgtttccccgctgctgctgccgcattacgctcgtcacgagagataattttttccggaaaggaatggatagatccatgcgtgaaattgaagtcagccagatcacagacattgttgagaagctgtgcatcgcggcaaacgagcacctgccggaggacgtaaagtgcgccatccgctcctgccgcgcctgcgaagacggccagatcgcacagggcattctggacaacatcatcgaaaattttgaaattgcagataacgagtgcgttccgatctgccaggataccggcatggcctgcgtattccttgagatcggccaggacgtgcacttcgtcggcggcgaccttacggaagccgtaaacgagggcgtgcgccgcggttacgacaagggctacctgagaaagtccgttgttaaggacccggttcgccgcggcaacaccggcgacaacaccccggctatgctgtacaccgagatcgtcccgggcaacaaggtgaagatcaccgtcggcccgaagggcttcggcagcgaaaacatgagccagatccgtatgttcaagccgtctgccggcttgcagggcatcaaggacttcatccttgaggtcgtagagaccgcaggcccgaacccgtgcccgccgatggttgtcggcgtaggcatcggcggcacgtttgataaagcagcgctgcttgcaaagaaggcgctcatgcgcccgcttgattccgagaacccggacccgttctatgcagatcttgaaaaagagatgctcgaaaaggtcaatcagctcggcatcggcccgcagggcttcggcggcaagacgacggccatcggcctcaacatcgagaccatgccgactcatattgccggcatgccgtgcgctgtcaacatcaactgccatgtaacgcgtcataagacggaggtgctgtaaaatggaaaagcgtattacactgcctttgactgcggagctcgcaaagacgctccatgccggtgacagagttctgctgaccggtaccatctatacttcccgcgatgccggccacaagagaatgtgcgaggcacttgcacgcggcgagaagatcccgttcgatcctacggacgctacgatctactacgtaggcccgaccccggcaaagccgggtcatgtcatcggttccgcaggtcctaccaccagcggccgtatggacgcgtatgctccgaccatgatgtccgtgggcgcacgcggcatgatcggcaagggcgctcgtctgccggaagtcgtagaagccatgaagaagtataacggcgtttacttcggtgccatcggcggcgcaggcgcgctgctcgcaaagtgcatcaagaaggcagagctcatcgcgtatgaggatctcggcgccgaggcactgcgcaagctgtatgtagaggatatgccgctcgtcgtcatcatcgacagcgaaggcaacaacctttacgaagaaggccgcgcagagtaccttgcagagcacaaggcacacgaagcggaaaagaacgcttaagttgtaaaaataacaggagcggaactatgggttaggttccgctcttgcttatattaaacaggatgtgccgcgcacagctttcagaattttttgcacagtgcattccgaaaatttagtttaaggggaataaacgcatgacacctgaaatgatcgctgaaatactggaaaccgtaatgattcttgcattcggtctttcctggccgctttccatttacaaatccgtaaagtccagaaccgctaagggcaagagcctgcagtttgagatcttcatctggctcggctacatcgccggcattgtgatgaagtgcattcagttctttgtcatcggcaagagcggtccgatcttcgttttgagctgggtcttctattgcctgaacttcatcgagatcaccatcgatatgcttctctacttccgcaacgtgaagctcgataaagagaacgagggtaagtaatttcacatgtgtccgaaacggcagcctgcgggctgccgtttttgcgttgcatcaaaaaaagacggacaccgaatgcccggtgtccgtctgcgtttattaagttaaaattacagcataaggtcgcggatgtacttaatggtgtacttaacgcccttctcgcctttttcgccctgccaggtcatggagtgcggttcgatcgcgaggtagccgtcataatcgtgctgatacagcaccgcgaagaatgcgcgccagttgatggaatcgatgcctgccggcgggttgtcgtagtaacgtctgcctgctgcaaagtcgcccatcagctcgtccttgagctccgggtgacgaaccatcaactcgtggtttttccactctgccggctcgtgggagtcgccgtactggataacgccctttacgtggcaatatacgaacttgtcgccccattccatgccttccttgaggtatgcgcccttgtcgccgccatgtacgaagctgtgggacggatcatacttgatgccgaggcccggaacttcgtccagaacaagcttccactgctccggtgtgcgaatgtagttgccgcccatcatgcagttgacaatgccgcacttcatgccattttcttttgcgtaggaaacaatccggttcagaaccttaatagccgcggtgatgttcttgtagtaggaaagctgcggaacatacgcaacgctgcacagataatgctttgcgccgagtgctgcgccgaaatcgatggctttcttcacttcgctccactccgcttcgatcacatcgccgttctcgtccagaatgtggcttgcccagcggcctactgcgccgacttcaacgccggtctcttcaatggcctttttaatctcgtcctggttcttgacgacctcgtccagcggacgaccgaaaaattcaggcgggttcaggtcaaactcaacgaagtcgagtccgagctcttttgcgtgcaccaatgttttggcttccggtgcgccgataataccgagtttcattgtgattcatcctccaataagaaattaaacaataacttgatcggcaaacactgccgatttttaccatgttacaccgagcacgtgcaagtcgcggtcggcctgttccttgttttccaccgtgatggtgtgcagaccaaattcccgcgcagcttcggtgtttttcgcgttatcatcgaggaaaacggcgttttccggcgtgatgtcaaagcgctcgcacagtgtttcataaattttcctgtccggctttacgagctttacctcatacgaaatgagtgcgccgtccgcatacggcaggaaatcaaacgtgtctttcacacggttaaagccgaattcgctgaagtttgaaagtatgtagaccttgtagcctttctttttcaaatcgcgcacccagtccgccgcgtaggggtatacggtgacaagctcgtggctgtcgtgaacaatgcgcctgatttgctccgggtagtccggcgcatttttcgtcaacagcgcgacgacctcttcctctgtcagcacgccgcggtcgatctctgcccattcgggactcatcacggttgcgtttgcaagtgtatcgacaagatcttcgccgaaccactccacaaagctgttgtgccagtgccattcggtcagcacatttccaatatcaaaaataacggtatcaatcataaaaaatcttcttcgcctcaaacacggcttttcctttgtgatgatttgtgttataatagagacggaatttcaggtaaaattcacattcttttgtttattatactatgaaaaactcaaaattgcaatgcctttttgacggaatacacatacgcatttaaggaaagttgccgtgtgtaaagtcgggcgtctatacggaaaggatagctttcacaaatttgaaagccggggaaaacagcatgacaaattacgcggccgcgctggcggcgcagtttcacttaaaagaacagcaaacggcaaagctcattgagctcatcgacgcaggcaacaccatcccgtttatcgcgcggtacagaaaagaggagcacggatcgctcgatgaccagaccatccgcacggtgtacgagcgcctgcagtacctgcgcaatcttgatacgcgcaaggcggaagtgcgcgagcttatcgagggcacgggaaatttgacgcccgaaattgaaaaaagccttacaaatgcggcaacgctggcagagatcgacgatatttaccgcccgtttcgcccaaagcgcaaaacgcgtgccggcatggcaaaggagcgtggcttagagccgctcgcaaagaaaattctggcgcaggaaaagggtgttgacccgatgagactcgccgagggttacgtcaacgcagaaaagggtgttaatacgtcggaagacgcactgaacggcgcgaaggacatcatcgcggagacgatttccgacgatgccgttatgcgccgccgcctgcgcatggctgccatggcgcagggcgtcatcacgagccgtgccgcaaaggacgaggattccgtgtaccgcatgtattatgaattctctcagccggcggcaaaaatcgcaggccaccgcgttctggcgctggaccgcggcgagcgcgagggccttttaaaagtttcgctcgaaatggatgacgtgcgcgggcaggcaatcttgacctctgcttacgtaaagggcaattccgcgtgcagcgaagtcgtacgcgaagccgcagttgacgcatacggccgtctcattttcccgtctatcgagcgggaaattcgtgcggagctgaccgaaaaagcgtgcgacaacgccattaaggtgttttccgtaaacctccgtcagcttttgatgcagccgcccgtcaaaggccgcgtgaccatcggccttgaccccggctaccgcacgggctgcaaggtcgccgtcgtcgatgccacgggcaaggtactcgacaccggcgtcatttatcccacgcacagtgaggcacgcgtgcgcgaagccaaacagacgcttgtaaggcttatcaaaaagtacggcgtcacactcattgccatcggcaacggcacggcgtcgaaggaaacggagatcttcaccgacgaaacgctgcgcgaaaatcatcttgatatcgattacatggttgtcagcgaggcgggcgcgtcggtctattccgcgtcgaagcttgcggcggcagagtacccggagtacgacctgacgctgcgcagcgccgtttccatcgcgcaccgcttacaggatccgcttgcagagctcgtgaagattgacccaaaggccatcggtgtggggcagtatcagcacgatatgcccgcaaagcgtctggatgaagcgctcggcggcgtagtcgaagcctgcgtgaatgcggtcggtgttgacctcaacacggcatcaccgtcgctgctcgaaaacatcgcgggcatttcctccgccgtggcgaagaacatcgtcgcgtatcggcaggaaaacggcgcgttcacaacgcgcacgcagatcaaaaaagtgccgaagctcgggccgaaagcgttcgagcagtgcgcaggttttctgcgtgtgccggaaagtaaaaatatcttagaccacaccggtgtgcatccggaatcgtatgatgcggcaggcactttactcaccgcctgcggctatgacctcaaaaaagcgccggagggcggctttaaggggctcaaggagaaaacggaaaaactcggcatcgcaaagctcgccgtgcagtgcggtgtaggcgagccgacgttaaaagacatcatcgcggagcttgaaaagcccggccgcgacccgcgtgacgagctgcccagtcccatcctgcgcagcgacatcaaggacatgaaggacttgaagcccggcatggagatgcgcggcacggtgcgcaacgtcatcgatttcggtgcattcgtcgatatcggtgtgcatcaggacggccttgtgcacatcacgcagatctctgataaatttgtgcgtcacccgtccgatgttttaaaggttggcgacattgtgaccgtgtgggtgcttgccgtagacgtcgcgcgcggtcgtatttccctcacgatgaaaaagccgaaagagcagcaaaattaaaaaatcgcggacagctttatgctttttgtccgtgaacggttgacacgaaggcccggacgcggtaaacttgttttcggcaaaacacagaaaacatgggggcgaaagaggaaataagatgacagaagaacgcagtgaaagtgcagcggggctttcctttaaaatgggggaggcgctgctcagaaacggcgcggagatttttcgcgtgcaggagaccatggagcgcgtggcgcgcgcctacgacatagaagaatacgacgtgtacgtgctttccaacgcaatctttgcaaacgcggtggaaaacggagagaagatcgacacaaaactgaaattcgtgcccggatccaccattcatttcgggcgcattgtgggcatcaaccagctttcacgcgagattgtcgcgggcaaagtctcggtagaggaagcctatgcgcgcttgcgtgaaatcgttgccattccgtatacgcaccccattcggctcgaccttgcgtgtgccgtaggcagcgcgtgcttcagttacctgtttggcggcaccgtgttcgacgccgctgcggcgttcatctgcggctttgttttgcaggtgttcctaaacgccatcgatagccgcacggcctctaaattcatcatcaatctggcgtcaagcgccgttgtggcggtttgcgccgtgctgctgtttaccgtggggctcggcgacagcttagataaggttatcatcggctccatcattcgtcttgtgcccggcgtggcgctgacgacctccatccgcgactttttaaacggcgattatctgagtggtaccattcgcatgattgacgcgtttttggtcggcgggtgcatcgccatcggcgtcggtgccgtggtgatgacctacatcagcctgacaggaggtgcgccgctcttatgacaccggaagttgttttcgattgggcaatccagaccgcggtggcgtttgtggcaaccatcgcgttcgccatcgttttccataccccgcgcgagcaatacgtttgcgccgggcttgtcggcgcattcggctggctcatttatatcgtctatgtctattttacgggtgacgttgtgttcgcgtcgtttttcgcggcgctcggcctcacctatttggcgcgtgtattctcgtttgcgcgcaaagcaccgctgcccgtgttcctcatcgccggaatttttcccgttgtgcccggcgccggtatttattatacgggctatcacattttcatgaacaacaacgtagaggcgatgtccaagggcgtagagaccattaaaatcgccattgccattgcgctcggcatcggcatcgtcgtctcactgccgcgctttttcttcacactgcgccggaaaggaagcaccacttgaaacaggttaccatcgctcaaaacgacgctaaccagcgcgtcgataaatttctcacaaaaacataccctaacctgccgcagtctatgctgtataaggctatccgcaaaaaggacatcaaggtaaacggcaagcgctgcgagatttccacgcgattgcaggagggcgacgtgctgacgatgtacttgaaagacgagttcttcgcgcaggcgccgaaggaatatgattttctgaaagctccgctgaagctcaacatcatttatgaagacgagaacatcatgatcctcgataaaaagccggggctcatcgtgcacccggacgagcactatcattttgattcgctcatcgcgcgcgtgcagcactatctttacgaaaacggggagtatgacccggaagcggaaaattctttcgccccggcgctcatcaaccgcatagaccgcaacacgggcggcatcgttatggcggccaaaaatgctgagacactgcgtatcatgaaccaaaaggttaaggatcgtgagatggataagctctatctctgcgttgtgtgcggcgtgccgaagaagaaaacggatattttaacgggctatcttgagaaaaacgagagccagaaccgcgtgtatatctcgaataaaaaaacgcccgaaagccgcagcatcaggacaaaatacacggtgcttgagacccgccgcgatttcagcttgctcgaggtggagctgctcaccggccgcacgcaccagatccgcgcgcacatggcgtccatcggccacccgcttgcgggcgacggcaaatacggcaaaaacgtgcagaacaaaaagacgggcttcccgtatcaggcgctttattcctataagctcatcttccgctttacgaccgaggccggcatgttaagctacctcgacggccgcgagttcacggcacaggacgtctggttcctcgatgaattccgcgcgtttccaaagtaattcaaatcccaatagaacagaaacgctcccgtttccctgcgcagtgcagaggaacgggagcgtttcttgtgtgttataaggatcagaggagtgtgatattaaaagtaattgaacgggtttgtggtgctgccgtagtaaataacttcaaagtgaaggtgcgggcccgtagaattgcccgtagagccgacgtacgcgatcgtttggccgggggagacggtatcacccacagagcacgcaagggcgctggcatgcgcgtagcgcgtggaatagccgttgccgtggtcaatgaacacgcagtagccgtagctgtccatccaagcgctgtaaatgactttgccgccgtctgccgcaacaatgggcttgccgtagatgccgccgcccgcaatgtcgatgccgcggtggccgccgtcgccgtaatagcaggtgatgtaggtgtaacccggcatcggccacacaaagctgcccgtgccgatatatccgacaccgctgtcgtatgagccgccggagttcgtgcttgcggctttcaaagcagcgtagtaatcttcgtaccatttatcaatggccgcatcggcctcttctttttccttttcgaggcgctcggcttccgcctgtgcttcggcttcgttctgctcggcctcgtctaagagcttctggttttcgaggtacagtgcggagagctcatcgcttttggaatcgagatcctttttgtcggtgctcagttcttctttgtccgcgttgattttttccacctgttcctgaatggaggtcagttgctcttcaagcgtgtccaaaagctcggtatcgtgctttgtaacggactgtatgacttcacttttctgcgtgtaatccacaaggcttgtgctgctcagcaaaatggaaaggttagaagcttctcccgccatgtataaggcgcgcaggcgctttttcagttttgtatagtttgcgttgatgctgatgcgtgtgtcggcaatatcctgctcgccctgttcgatctgcgcatccagctcgttgatgcgctgcaccagaatgtcaagctgctgctggataatatcaatcttgccctgcagctcgtcgcggtaggcgcgcttttggcttacgtcatcgcgcagttcttcaaggcgtttgttgttttcttcctcttgcttttcgagttcggcaagctgagattttaagtccgtgatggattctgccgaaacgttcggcaactgcaccacgccggaataaaaggctaaaagacctgcaagcgtaaacgcggtcagaccgcgcagaaagctgtgcttacgcaactgcgttctctccttcgttattgagatatttgccgatggaaatgctgccgccgaagaggccgaacagcgcaccgacaatggcgtagcccgcaatgatgtacatcacatacgggtcgatatccacagcgttaaggaacggcacgatgttataaagcgcctgtaccgcgtacttataggcaacgagcaaaatcgcaacggaaatgccgccggaaataaggccgatgagcatgccctctacgatgaacgggatgcgcacgaagccgttcgttgcaccgacggacttcataatgctgatttccgtgcggcgggagaacatcgtgaccttaacggtgttggaaatgatgaacagggaaacgatggcgaggatgacgatgattgcgaggcttgccacgcgcacgatcatatcgatgttcgaaagctttgtggcaatgtcgctgtaatcggtgtagtgatccacgccctcaatggcctgtatctgctgtatagtttcgtcatatttggagagatcatgcatggaaatttgataagcgtccggcagcgggttttcgtcgccgtccaaaccctccagcacaacggcgttttcgccgagcaagtccatcatgtcggcaagaccgtcgtctttcggcacaaaggtgcactcgctcacgttttcaatgctgcgaatctggtcgccaacctgcacggcggaaagagacggcaaaccgttcgtcagatacaccgtgatgctgttgttgtcttcaatggaggacatcatggaggtaaggttgatggaaacaaggcttgcgcagccggtcaaaagcaggcaagagatcagcacgccgatggaggcgatactcatcgttctgtttttccaaaggttttttacgccttctttgagcaaatatccgaaattatgaaacttcatgggaatctgttaccatcctttcacacaggtcagccgtttgcctggtcattgttttgcggagccgtgaattctttcgttgcatacggctgtgcgtcggcatccgccttggcgcgtgcttcctttgcacggcgaatggcctcgcggtctacggctacggtctcctgtgtggcaacggcctgtgccgcagcctgctgctccttggagatggcagcggtatcggccacaatctcgccgctgtgaatctgaatgatgcgcttgtggaagtgcttgacaagggagtgctcgtgcgtgaccatcagcacggtggtgccgcgctcgttgatggcgctgagcagatctacgatctcgtaggaaagtgccgggtcgatgttgccggtcggctcgtccgcgatgatcatggaggggttattgacaagggcgcgcgcaaggcccacacgctggcgttcgccgccggacatttcggtggggtaatgctttgctttgtgctgtaagcccacaaggcccagaatatacggcacgcgctttttaatggccttcggggaggcgcccacaacgcgcatggcaaacgccacgttgtcgtacacggtcatgtggtcgatgagacggaaatcctggaacacaaggcccatttttctgcgcacatacgggatcttgcccttgcggatgtggctgatgtcctgtccgtcaatgagcacctgaccctcgttcgggcgctcctcacaggtgatgagcttcaaaaaggtacttttgcccgcgccgctggaaccgacgataaagacgaactcgcctttttcgaccttcaggttgatgttgtgcagcgcttccgtaccgttattgtaaactttagaaacattgcggaattcgatcaaagtgtactcctcctttggagatataaataaactcggcgcggcagaatgcccgcccggtcatttgcaaatgaaaatctcatttgggtgaaataccgcagaaagcctacgataccaccttgctattataccaacatggtttgcatttttaattctaaaaaagaattattcgttatacttttgtaacttttgtaacttcttgtaatgaaaaatttgcgcagaaagcagcagcgccgcacaaaaccgtgtaaaggctctgtgcggcgctgcattaggaataaataaaacgagaaatcaatcagaatttagaggggctgctggaaaggtactttttgaccatcagcgctaccttaaagacgatggcgtcctcaaactcacgcaggtcaaggccggtaatcttcttgatcttctcaaggcggtaaacaagcgtgtttctgtggacgaacagctttctggaggtctcggaaacgttcaggttgttttcaaagaagcgctgaatggtgaacagcgtttcgtggtcaagggactcaatggagccgcgcttgaaaacttccttcaggaacatttcgcaaagcgtggtcggcagctgataaatcaggcgggcaatgccgaggttgttatagctgacaatggtcttttcggtgtcgaataccttgccgacctcaagcgcaatctgggcttccttaaaggagcgcgcaagatccttgatgctgtccacaacggtgccgatgcccacaacgcagtgggtgtagaattcgctcgaaagcgtgtctacaatggagccggcaagtttatcgatgtcgcgcgggtcgatgttggagcgaatctccttcacgagcgcgatgtccgtctcattgatgttgatgacgaaatccttgttcttgtccgggaacagattctgcaccacgtcatacgcggaaacatcggtttggttcgtcactttgatgagcatgcagacgcggctgacatcagagttgaagcgcagctcacggctcttcaaataaatgtcgccgggcaggatgttatcgaggataacgttcttgatgaagttgctgcggtcatacttttcatcgtaatactgcttgatgctgttcagagaaacagccagcaggccgacatattttgcggcttccgggtcgttgccggagacgaacaccgcgtattccgggcgcgggcggctgccgaaggatttatatgtgtagttgccggaaacaaatgcagcctgagatgcaatgtcttccgccgttacggattccgttacttcgccgatcttgccgagctcgctgcatgcgatgatcacggaggactcgtcgatgacgccgatcgtgcggtcaatggaatcacgcatctgatgaatgacgccctgaaacagtctattggacatgatttcctcttttctccgtcgcttcaaattcagtcctgcgcggttttcgacggctcccgcacagttatccattctctatgttatctatattacagaattaaaaccaatttttcaagtctttttgagtattttttttgagagttcgtaaatctgcacaaactgaaaaactcttttttgctctgtaagcaatttagaccccatatagcgcctaaaaacaggagcggcacaggaaaaacgcccgtgccgcccgaaattgcgatgctctttactttaagtattcggtgaaaacatagcctgtgcggttgccgtagctcaccttgtaccactcgcttgtggtcttttccaaaatcgtcacgcttgcgccctccgggatgaccgtcagcacatttgtgtccgtgccggtgccggaacgcaaattaagatacgccgtggtgcgcatcgtatcggaagaagcggagctgtccgtgctgccggaatcgctgccgttcattgtgatatattcgctgaacatatagccgctcttgccgttcacggttacgccgtaccagtcgctcacgcttgtgtccgacacggtgatggccgtaccgtttgcgataacgccgagggagcggtagtttgtgccgcggccttcgcgcaggtgtacgtcttcgttcgtctgtgcggaagcggagccgtctgtgctgccggaagacgtgttgttatcggagctacccgtgccggtcagcttgatgtattcgctgtacatgtagccgcttttgccgtttacggtcactgcataccacacgtcgcttttatccgttacggtaatggccgtgccgcccggaatcacgccgagtgaactgtaattcgtgcccttgccgctgcgcaggtgcacgccggtggtcgtctttgcggcctcgccgtttgtgcccgtgttggaattatcggagctgccggagtcggaagaatcatcctcgttcaccgtgccggtcacgtttagatattcggagaaaacgtagcccttctgaccggaagccgttgtcacggcataccattcgctgttcttcgtgcttgtcacgtttacttttgtaccctctgccagcaccgtaatggtgtcatagctaaggcctgggcccttgcgcaggcgcacaccggcagtcgtcttcgcgttgaatgcggagtctgcttcggagaagctgccgtttgcggaggacggcgttttgtcggaaacaccgtcgctgccgaaggtatacgtcacaccgttgatggtacgggtggtgttgatgacatattcgccgttttcataatagaaatagtcgccgtcaaacttataccagcctgtcgtggggtatgtaatgctgccaagcttgtgccattgcagccaaccatggcccggaatggattcgtagcgcatattaacgccccatgtgctgttgtccaccaccatgccgttgccgacgtacacgcccacgtggtcatagttcgcaatggtcacaattaggccgtgcgtgcgcgggatcgtatcgatagggccggattccaccgcgtcgttcgcctgcgccgtaacggtgcgggggtagttccagttcggctgaatgttgctgttatcatccacccagcagaagtaagaataaataagaccgctgcaatccgaggcgcgcacaccgttcgagttgaagttgccgtaagcgccgtaagaatactgccaaccgtcgcgataggcctttaaggcgtgctccgcaaggccgatggacgtcagctccgcggaagccgcgctgacggtcgtgccggtgttcggcagtacagtgctgcatatcaaaataagcgcggcaagcaaaagggccgcagccgttcgggaaagctttttcacgttctgcattgttgtgttcctccgttcgtcattacattatataaacgtataagcgtgtgttcacggcggacggtccgccgcaaagatgtgggcaatagttattacaaatcggtaacattgtatcacaaagattacaaaaatgcaacccctattcgctttcacgtgcaaagaaacttatactatctgtatacaatatcgaaaacgcagcatgtttcacgctgcgaaatgttataagaccgccgggttttccacaaatcgctcaccctgtgggggaaagttgagtgtatccgtaaaaaccgcggaatcccccgccgaaacgcccggaaaccttgacaaaatcccgtgaaaatgcaataatattaagtcaatagaatgtcatcaaacacactatttataaacacgcttgtgttttgataaactggagggagaaaacgtgtctaaagagcttgctaaggcttacgagccgaaagaagttgaagaccggatctatgacttctggatgaagggcaaatactttcatgccgaggtagatcccaaaaagaagccgtacaccatcgtcattccgcccccgaacatcacgggtcagctgcaccttggccatgccatggatgaaacgctgcaggatacgctcattcgctggcgtagaatgcagggctattctgctctgtggctgccgggcaccgaccacgcttccatcgcaacggaggcgaagatcgtagaggccatgcgcaaagagggcatcacaaaggaagaaatcggccgcgaaaagttcctggagcgcgcttgggcgtggaaggatcagtacggcggcaggattgttgagcagctcaaaaagctcggctcctcctgcgactgggatcgcctgcgcttcacgatggacgagggctgcaacaaggccgtcaaccacgttttcaagaagctgtacgataaggggctcatctaccgcggtgagcgcatcatcaactggtgcccgcactgtaagacttccatttccgacgccgaggtcgtgttcgaggaaaaggaaggctccttctggcacctgcgctatccgctgagcgacggctccggctacattgagcttgcgaccacccgcccggagaccatgctgggcgataccgccgtggcggtgcacccggatgacgagcgctacaaggcactcgtcggcaaaacggtcatcctgccgctcgtcaataaggaaatcccgattattgccgacagctacgtggagcaggacttcggtaccggcgttgtgaagatcaccccggcacatgacccgaacgacttcgaggttggtctgcgccataatctgcccgtcatcaacgtcatggacgacggcggtgtcatcaacgaaaatggtggcaaatacgccggtatgccggcgctcgaggccagaaagcagattgtcaaggatctcgacgaagcaggcttcctcattaaaattgagccgatcaagcacaacgtcggcacctgctatcgctgcggcaccgttgtggagccgcgcgtttccacgcagtggtttgtcaaaatggagcccctcgcaaagccggccatcgatgccgttaaggacggcgacatccgcttcattccggagcgcatggataaggtctattataattggatggagaacatcaaggactggtgtatctcccgtcagctgtggtggggtcaccagattccggcgtggtactgcgagtgcggcgagaccatcgtctccgagaccgtgcctaccgtctgcccgaagtgcggtggcacacacctgacccgcgaccccgatacgcttgatacgtggttctcctccgcgctgtggccgttctccacgctcggctggccggataacaccgaagagctcaaatatttctacccgaccaataccctcgtcacgggttatgacatcatcttcttctgggtggcacgcatgatcttctcgggtcttgagcacatgggcgaagtgccgttcaacacggtgttcttccatggcctcatccgcgacgcacagggcagaaagatgagtaagtctctcggcaacggtgtcgatccgctcgatgtcatcggcgtttacggcgcagatgccctgcgctttacgctcgttacgggcaacagccccggaaacgacctgcgtttctccgaggaaaaggtcagcgcttccagaaactttgccaataagatctggaacgctgcacgctttatccttatgaatatcgaaggcaaggatatcgactgcgccctgccgaagaagctctatacaagcgataagtggatcttaaaccgcttcaataacgtcacggcagccgtcaccgaaaacctcgagaagttcgaactcggcatggcggtcagcaagctctatgacttcatctgggacgatttctgcgattggtatatcgagcttgcaaagatccgcatgaacggcgcggacgaagagagcgcagacagcgcccgccgcgttctcgtctggacgatgagcaacaccttaaagctcctgcacccgtttatgccgtacatcacggaagaaatttggcagacgctgccgcatgacggtgaagccctcattgtcgcaaagtggccggagtacgacgaagccctctccttcccgcaggaagcaaagaacctcgaaaacgttatggcgctcatccgtgccatccgcacccgccgcaatgagatgaatgtgccgccgtcgaagaaagcgcacatctatgtcgataccgcccacaccgcgccgtatgaggaagcgagcgaattcatcgcacgcctcgcttacggctccaaggttgagatcggcacgggctttgacgtacagggggccgtaacggctgtgaccgacgacgcaaaggccttactgccgatggacgatcttgtcgataaggcagcggagaccgcacgtctcaacaaggagcttgcaaacgcacagaagcagctcgataccgtcaaggcgaagcttgcaaatgaaaaattcacctccaaagcgccgcagaatgtcatcgacggcgtaaaggcaaacggcgaaaagctggaagcaaagatcaaactgatcctcgaaacattggagagctatcaataatgacctacgaagaagcactgcaaaagatcaattcccggctgcgcttcggcatcaagccggggctggagcgcattgaagcgctctgccaaaagctcggcgatccgcagaagaagccgcgttttgtccacgtagccggcacgaatggcaagggcactacctgcacgcttatcgcgagcgtgcttacggcggcaggctaccgcacgggcctctacacgtccccgtatgtgctcgatttccgcgagcgctttcgcatcgacggcgaaatgatccccgaggcggaactcatcgaagaagtaaagcgcgtgtcgcccgttgcggacgagcttgaagccgcaggcgataccgtcacggagttcgagttcatcaccgcgctcgcgttcgattggttcgcgcagcgagactgcgattttgtcgtgctcgaggtcggtcttggcggccgatttgacgcgacgaatgtcatcgatacgccggaagctgcggccattgcgtccatttcgctcgaccacacggcgattttaggcgatacctacgcgaagatcgcgttcgagaaagcgggcatcatcaaaaaaggcggcgatgtcgtgctgtaccccgtgcaggatccgtccgtgttcgagaccatcgaatcggcgtgcaacgagcgcggcgcacacctgcatattccggatgaaaagaacatgcaggtaaacggcacggcgcttacgggcaccgcgctcatgtggcgcggcctgccgcttacgctgccgtttacgggcgcgcatcaggtgcacaacgccgccacggcgcttactgtgctcgacgttctgcgcgaaaagcacgcaaacatcaccgatgaggcgctgcaaaagggatttgcctcggcgtatatcccggcgcgtatggagattttatcccaaaagccgctcgtgcttttagatggcggccacaaccccggctgtgcctctgcgttgcatgaagtgctcaaaacacatctttccggccgtcatatcacagccattatgggcatgatggcggataaggacagcatgcgttatctggagctgaccgcgccgcactttgagagaattatcacggtgcagccgcaaaacccgcgctctttatcggcggaagccctcgcggacgaggcaaagcacttctgcaaagacgtgcagcctgcgcagagcatgaaagacgcgatagagaaagcgaccgtttcaggcgacgaagtgctcgtcatctgcggttcattcttcttagcatctgaaattcgcgacctcgccatcgaaaaatacaaggcgtaacacaaatttaatctgccgacacactgcggcaaaaaatacggacaggttcctttaaaattttctaaggagcctgtcctttttgttattatttaaatttcaaacggacatttcgggccttaaaggagcgaatacgatgaatttgcgaattgaattaaaaggtggtgcgatgacggcctccatgcgcggcgagctcgaccaccacactgccggtgaaatgcgggagcagatcgacagtacagcgaaaaaagtgcgcccgcaaaagctgattttagattttaaagaggtaccgtttatggattcctccggcatcgggctgattctcggtcgtgtccgcacggcggcactgtggggcgggcacgtcaccgtacgcggattgtcaccgcagttaaagaaaatggcggagctttccggcgtctccgcgctcgcggtgctggaagacgccgggaaaggagcgaaaacatgaaacagatcatcaaccgcatggagctgcgcttcccgtccggctccgtcaacgaaagctttgcgcgcggcgcggtctccgcgttcgtcctgtgccttgaccccctcgtcacagacttaaacgatttaaagaccgccgtcagcgaagccgtgacgaacgccatcgtccacggctaccgtgataccatcggcaccgtgtacataacggctgtaatctacgcggacggcaccgtgcaggtcaaggtgcgcgaccgcggctgcggcatcccggatatcgaaaaagccatggagccgctgtttaccaccgggggagaggaacgtgcggggctcggctttgccgtgatgcaaagcttctgcgacagcgtgcgtgtcatttcaaaacctcaaaaaggcactaccgtgacgctcacaaaacgttttgagcgcaagccgaatggagaataaagactttgccgagcgcaacgtggggcttgtgcgcgcgcttgtgccgcgttttctcgggcgcggcattgaatacgacgacctctttcaggcgggctgcgaggggctcatcaaagccgccgcacactttgaccccgaccgcggctataagttttccacatatgccgtgcctgtcattttaggcgaaatgcgacgcctgttccgcgagggcggcacggtaaaggtctcgcgcgggctgaaagagctttccatgaaagcggtacgcctatccgaacagatcgaaacggagaccggcaaagcgccgagtgtgtctgttcttgcggaaaagctcggtgttcccgaagaaaagtgcgcggaagccctgaatgccgcggcacagcccgtctccctcaccggcgacgacgaaaacaacgagacggacattcccgtcgatgcgccggaagaaaaaatcaccgatcacctcgccttacagcaaatactaaaggcgctgcccgaggaggaccagcgccttatctactatcgctattttaaaaatcagacccaaacggaaacggccaaaaggctcggcaccacacaggtgcaaatcagccgtcgcgagaaaaaattactcctccgtctgcgtggtctgctgctgtgaggtcgtttccgcgcccgccaaaacggtgcgcgtgttctttaagaagttgtagtcgctcagcagcatggcgtaatacgccaaattcacaacgccctggcgctcccaacggtggcattcgcgcagaacgccctcgcgctgaaagccggatttctccaaaatgcgctgcttgtcaatgtccgcatctaagcaaacggactgcacgcggttcacgcgtgccatctcaaacaggtagcggcacagcgcgcccatagcttctgccggatattccgtgcctacacagcggcggccgaacaaaaagcgcagctgcaccatgttcatgccctcgtctgcaccgccgatctcgatccacccgatgaggtgcgcgaggccggtgtttgcatatacgccgagcgttacggtgcgctttgcggcaaactgcgcgtttgcatcctgaattttatattccgcctgcacgcgctccttggcgggcgcttcatattcgtagcggtacagttcttcgtcctgcataatctcccacagtgcgtcgccgtccgcaaagccaaggcggctcagcgtcacgtttgcactggtgagaaacgggcagctctcaaaaagcaattcggttctcatttcggtttctcccatccctcatagtatcgtaagcggaagcggcatcttaaaccagtgccggcagctccgcaatgtcgtaaatcttcggcacgttttccacattgccaaagccgtaagcggcgaaaataaacggcacgcccgcctgtgtcgcggagttataatcccacaccgtgtcgcccacgtataccggggctttcaagtgattgtgctccgcgaccagcgcgatgttgtctgccttcggcttacctgtgctgcccatgcactcatagtccgtaaaatactgcgccatgttgtgcgccttcaaaaacgcctgaatatacccgttgtcgcagttgctcacaatgcacagtgtgtgcgtttcggaaagctttttcagtgtctcgtgcatgtgtgggtacagctttgcgccgtgctccgcaagatattcacattccagcttgaaattctcgttaaagatctgcattcggcgctcgtaagaaaggtacgggaacagcttctctgccagatcgtccataccaaggcccatcacgcctgcgtattcctcttttgtgggcaggtgcgttacgtccggctgcgtcttcaaatattcgagcaacaccaggcgtccttcctccacagcgtcccatagggtgccgtccaggtcaaaaataatgccatcgtatttcatcggaaatctttctcctttatatataatagtataggggagagggcgctcagccctccaaatggttcagatcatacggcgtttgctgataaacgtagtagttcagccagtttgcaacaagcagatgtgcgttgctgcgccacgtaaacgggggtgtcttctggtcgtcgtcatccgggaaataattgtacggcactttggggttcaagcccttattgatgtcgcggaagtattccttcgccagcgtgtcgcggtcatattccgcgtggcccgtcacaaagaacttgcgcccgcttttttcggcgacgatatgcacgcccgcaaggtcggagagcgaaagtacaatgagctcgtcgtgctttttgatatcgtcaaggtaaacctccgtgtagcgcgagtgcggcgcaaagtaattatcgtcaaagccgcgcatcaaggggtgatacgggttcaacacatggtgattgtaaatgccggagagcttttccttcatcaaatgcttctgaatgccataatggtagtaaagaccggcctgtgcgccccagcagatatagagaacggaatacacatgcgttttgctccattccataatggcacacatttcgtcccagtagtccacttcctcaaacggcatcttttccaccggcgcgcccgtgatgatgaggccgtcaaagcgctggtccttcacgtcgttaaaggtcttatagaatgtattcagatgataagagctcgtgttgcggctgacatgcgatgccatgtgcagcaactcaacgtccacttgcagcggcgtattgcccagcaaacgcagaagctgcgtctcggtctcgatctttgtcggcatcaaattaagtatcgcaatctttaaaggtcgaatgtcctgcaaagcggcacgctcgtgcgtcatcacaaagatgttttcggactccaaaacctcaatggcgggcaaatccgcctgtatacgaataggcattgctttttttacctccgtcatatatactattatatagggcacaggggcccgatacgtttcagtatagcatactttgtccctctgtaaaagagagtaaaagcggtttgaaacgatttttttcaaagttttttcgaaagtttttcggacttttttcagaaaaaaacgaaaaacgcaaaagaaaaggcgaaagcggcggttttgtttacactgtatgttgttgattttgcaaaagcaaaacacaatatatgcacacaaaaaagaaaatcgaaaaaaacttaaaaaaaacgaaaaaaagtgttgacaaaaagggttccccgtggtattatatacaagcgctcgagagagacggcaaaaaactgaaagcgaaaagcttaaaaggaaagccgcttgaaagagagcacaggacctt

SEQ ID NO: 1717 - DNA, 1421 bp, Unknown
  gut microbiota DNA sequence
ctatttttaccccacccgccatgctacactatcccccgaaaggagcggatgtgtatgaataagacccctaccgcctggatgctgcggcgggacgggattgcatttccctgtcaatggcactactacggaaacgccgacccggcggaggtggaggagaccctctacgccgccgaatggctgtatgatgctacccaaagcgaggagacccggcggcggtgcctggacctgatcgccgcctacggtgtggcgctacggtccaaccgcaatctggtgcggaacctgctgctggccatccgggagcggccctatgttttccttagccgcgctttcgtggagcgacacgccggagagcttttctatgtggacccggcccggccgccggagctgaacgccgccgtaaaccgggcgctgaacagcgaatttctgcgggtgcgtctgggcggactgtatgacaccgtacccggaaaccgggatctctactttcgagtgtctggggcggattttgattggctgccgctgatccgggcgtttgccgaagcccgtgccgccgacgccgacaccgtaaccgtactgtgggatcaggagagcaccggccacaatgaatatctgacggacgaggccggacatactttggatcatgttcccctaaaggaggtagtacaatgaccatttttgaagaaattttgggcctgctgtccggctcaccggagctgcacgcctacctgctggcctgcccggaacagctccaaaccaccgactatgcccatatcatcagcggtgcgcccattgcgctcacggaaaagggacggcttttagagcgcctgtccgagcatatgacacacagcgaagacgccggtctgattcgggattacagcgcctgtttgaaaacggcgctgcaggcgctggaaagcaaggaagctgcgttttcggcggagctttggaaggacggcgaacagcttgacggtccctatatcgccttatctgtagaggaagttcagcgtgccattcccaaatactgggaggatggcgataaggccatagcatactggcgtatagagcagtatcgccagggcggcgcatcggagcctgaaggatttgcatgccccgaatacacctttgccgccgatccaaatggagaagtacagtattttatgcacgatcccaaaaaacgccggcgtgtgtgggcggagggcgctttcggaggagactctgtccatttgaatctgccggtaccgtatcgccccggagacattctggaagtcagctgcgacccctatgtttcggagccgcattactgtattctgaccgaggtgggcaacgactgctgcggcgtgcagtgcttgtatcccggcgaaaacgggcgcatcgaattcggggcgctgaagcacgggcattatttcttcaactgttattacgcatcg

SEQ ID NO: 1718 - DNA, 637 bp, Unknown
  gut microbiota DNA sequence
actcggatagacgaacaatagcaagtgtatgatatgctctatttctatccgtaccatgatgtatgtaatcatatctcgaaaggaagatgaaatatacaatgtagttgggtgaaatgactatgaagcagaacaaagaaaaatttgattttaaggctttcgggcaagccattaaagcagcaagaaaagcaaagggaatatcacgcaatcagttagccgatacgctgaatattgcgccccgatatatcgcgtccattgagaacagcgggcagcacccaagtttacagattttatatgagcttgtaaccctgcttgatgtatcggtagaccagttctttttcccggaacgggaacaggagaagtccacgcgccgccgtcaactcgataccatgcttgacggtatgagcgaaaaagatttgaaaatcctgtctgctactgccaaaggaatagaggaagccagcaacgacgaaacgggggattaaagttctctcgtttttgtttatatagagtgattgaaacgtcgcagattgcggcgtttttcttttgggaaagttcgtcaaatttgccgttcccggtgttgtaggtagtaagggataaagtttcgtagcaagcataggaaaagagtacccttttccgtatt

SEQ ID NO: 1719 - DNA, 6367 bp, Unknown
  gut microbiota DNA sequence
gccgggctgggagacgtgcaggcggttgtcggtgaaaatctcggtacaccacagcaaaaaatcagtaagaatgcagtacgaaaaatatctgaaagtatttttgcaccgctatgtgtgcttcttgtagagtcgtgtgaagtacccgtgcggcgtgtgccgggttcgccggatgaagttttcatccgcggcaaaacacccatgacaaagcaggaggttcgcgctgcggcactcgcaaagcttgccgttaaaccgaccgatattctctgggacatcggcgcggggaccggcagtgtcagcatagaaatggcgcttgctgtgccgctcggatacgtgtatgccgtggagtgtgacgcagctgcctgttcgctgataaaacaaaaccgagacaaatttcatgtacataatttgacacttgtagagggcaaagcgccggaaaaattaacgggtcttcctgcaccggatgccgtgtttatcggcggcagtaagggtaatctgcccgagatcatagatgctgtattgaccgtaaacccgagtgctcgcctgtgcgtttccgctatcgcgcttgaaacgctgcaaacggcgctttcatcttttgcaacccacggcatgactgcgcaaatcacacaaattgccataagccgcagcagttcagtcggtaatttgcacctgatgaaggcgaataatcccgtttttttgattgtgagggaatgacatgctgcaaatgctcatcgccgcgccgaactccggcagcggcaaaacgactgtcaccattgcgctgcttgcggcgcttaaagcccgcggcctcaatccctgcgcgtttaaatccgggcccgattatattgatcccatgtttcaccgcagtgtgctcggcgttgaaagtcacaatcttgatttgtttttctcaaagccgcaaacagtgcaaaatttgtacaataaaagtgcagccgatcacggtgctgctatatgcgaaggtgctatggggtactatgacggtctcggcggcacaagtgacatcgcaagtgcgtggaatttagccgatacgttgaatctacccgtcctgcttgtcctgcgtccgaagggtgcaagcttaacccttgcagcgcaggtacgcggcttaatgtccttccgcacaccgcaccatatcgccggtgttatactgaatgactgtaaagaaaatttgtaccgtattttagcaccgatgctcgaaaaggagacaggtgtgcctgttatcggctatctgctcccaatgcccgaagctgcgatcgaaagtcgtcatctggggcttaaaactgccggtgagattgaaaatctgcaaaagaagatcacacttttgcgtgagacgatggaaaagacggtcgattttgaaaaactctttagcgtctttgcgtgtccggcacccaaagtaccgaaagaggaatctccgattcctaatgtgcgcatcgccgttgcaagggatgaagccttttgttttacatataccgaaacgtttgaagcgttcaaagaagccggcgcagaacctgtctttttcagtccattgcacgataaaagcttgcctcaaaatatcggcgggctgtatctgcccggcggttacccggagctttgcgtaaaggcactcagcgaaaataccgagatgcttttgcacatcaaaaccgcaatcaaaaacagtttgccgactgtggcagaatgcggcggctttttgtatttaggtcaaacacttgaagatgtaaacggcgacaaataccgtatggcaggcgttctgcccggcgaaggcttcaaggtcggccatctcgtgcgcttcggttacgcgacgcttactgcgaaggagaacagcatgctgctaaaaaaagacgagttgcttcctgtgcacgaatttcaccactgggattccaccgaaaacggcatagcgtgcacagcgacaaagccgaacggccgtacgtgggactgtgcttttgcaaacgaacatttttatgcgggttttccgcatttatactgggcgggcacgccgctgccgcagcgctttgcggacgccgcccgccgctacatgagggacaaaatatgacggaaacagaatttaaaaaccggctcaaaacaatcacgcagccggatgaagccgcgcgcaaagccgcccacgcgcattgggcgtcgcttgcaaagccactcggcgggcttggcgatctcgaaccattattagaagatgtggctgcgcttacaggtgtgccgcagttcgatttttcaaagcgcgcggtcttggtgctgtgcgcggataacggcgtcatcgcgcagggcatcagccagtccggcagcgacgtgacgcgtgccgttttgcagaatcttgcgcagcgcaaaacaagcgtctgcaaaatggcggaaacggtgcactgcggtgtgattcccgtcgatgtgggcatcgcgggagcgcccgtggacggtgtgaagaattgccgtgtgcgtgcgggtacgaatgatttcaccggcggccctgccatgtcccgtgaggacgctttaaaggccattgaggccggcatcgagctcgttcgcgagcagaaagcgcagggcataaagctcctcgcgaccggcgaaatgggcatcggcaatacgacaacctctgccgccgtgagctgcgttttgctcggccgcgcgcccgaagaaatgaccggccgcggcgcgggactctccgatgacggtctgcgccgcaagatcgaggtcatctataaaggcatcgcggtcaatcatcctgaaaaaaccgatgtgatcggcgtgctgtcggcgctcggcggcttagatatcgccgggctgtgcggcgtgtttttgggcggtgctctggagaatatccctgtcattatcgacggtttcatcagcagcgtggcggcactgtgtgcagcacggctgtgcccgacggcgactaaggccatgttcgcaagccacgtttcggcggagcccgcggcgtgtatcgttttggaagcgctcggcaaaaagccgctcatcacggcgaatatgcacctcggcgagggcaccggcgcggtcgcaagcctgccgctgtgggacatggcactcgcggtctacgacaactgttattcgttcacggagggcggcatcgcgccgtacaccccgcaatgctgacgctcgtcatcggcggcgcagcaagcggcaaaagcgcctatgcagaaagcctgaccctgaaacacccgctgccgcattactacgtcgccaccatgcaggtatgggatgaagagtgtgccaaacgcgtcgaaaagcaccgcgccatgcgaaaagaaaaacagtttaaaacgattgaatcacctatcagtcttgataaaatcagaataccaaatcgcggaatagttctgctcgaagacctcggcaacctgaccgcaaatgagctgtacgatccgaaaggtgcgggggtcaataccgcagaagccgttctgtacggcgtcgaaatactatataaacaatgcgaacatctgatagtcgtcggcaacgaggtattcagcggcggtgcagagtatgccgacgaaacaaatctgtacctcaaagcgctggcgcagatccaaaacggcatcgctgcccgtgcggatcacgtctgccgcgtagtgtgcggtatcccggtttattacaaaggagggggaaaggtatgacgattttgcagacgattgccgtggcgttcgctatgttttcggcgattcccatgccgcagttcgaatggagccaaaagaacatgcgatacgcgctgtgcgcatttccgctcatcggtgcagtgtgcggcgggttgtggtgcttagtcggcgtcctgcctgtgccggagctcgtccgcgcagcaggcttttgccttgtgcctgtgctcgtcaccggcggcatccatctggatggcttcgccgacacatgcgatgcgctctcaagctacggtgatgcggaaaagaagctcgaaattttgaaagacccacactgcggtgcatttgcagttatccgattatgcacatatttcatattgtattttgcgctctgtgcttcggtgaaatttacggtgcgtttcggtgtggtttggatattggcacttaccttggagcgtgcgttttccggcctcgccgtggcatcatttcccatggcaaaaaacaccggtctcgcgcatacgttcgcggaagccgcagaccgcataacggtgcgccgcgtcttgattatttatactgtcgtgctcggcgctgcgatgctcgtgctcggcggctgggcggccgttttggctgttttacttgtcttttggcggtattacgcagtgtcgaaaaagcaattcggcggcatcacgggcgaccttgccgggtggttcttgcaaagggcagagctcgccatgttggcagcgctcgccgtgtgccagtggggaggaattttgtaatgttgtttatcacaggtccgctttacagcggcaagcgcacgttcgcgcaaaagctcggcggtacatgctgttttgaggtgcagaagcaggccgaaacgacggaagacctcgaagcacttgctaaaatactttctgaaaaatacgatattatcaccgcaacggaagtcggcggcggtgttgtgcccgttgatgccacagagcgcgcaaaccgcgaaaaagccggccgcttggcatgcctgctcgccgcgcgtgccgattgtgttgtgcagatgttctgcggcattccgaccgtcttgaaaggggaattgcccaaatgaaaatttaccttttgcgccacggtgaaaccgcctataatgttgatcaccgctatcagggcgtaacggacatttcactctcaccggccgggcttgcggcactgaagcaggcggacttttcgcccgaaaccgtttatgtcacgccgttaaagcgcacaaaacagacagcggagattttatttcctatttccgagtatatccccgtaaacgacctcagcgagatgaatttcggcatatttgagggacgtaactataaagagatggagcacgattccgcctaccgcgcatgggtggattctaactgcgaaagcacctgtcccggcggcgagtgcaaagcggatttcagcgagcgtgtttgcaaagcatttgaatcactgctaaatcaatctattcaaaatagtgaagacatgctcgttatcgttgcgcatggcggcacgcagatggccgtcatggaaaagtacgctgtgccgcagaaaaattattatgaatggtgtgcaccgactgccggcggctatgtgctcgatgcccgcgattggcaggaaaagcacgttttgcatctcatcggggccgtgcagtacacaaaggaggccacatgctgattttcttcgccgtcctcggcggattcattttagacgcaatcttcggcgaccccctgtggctgccgcacccggttgtatatatgggcaaggttatttcctttttagatcgaagcttgcggaaaattttgccaaaaacaccgcgtggcgagcgcatcggcggcgcaatcaccgcattcatcctgcctgtcggcacattcctgctttccggcgcggtgtgcttcttcttttataaaattcactgggtgttcggacttttgattcaaatgttctggtgcgcgcagtcacttgccgcaaagggacttgtgcaggagagctgcaacgtctacaaggaactcaaaaagaacgacctccccgccgcgcgcaaggccgtctcccgcattgtcgggcgtgataccgacgcgctttccatggagggtgtgacaaaagccgctgtggagaccgttgccgaaaacgccggtgacggcgtgatcgcgccgcttctttgcatgctcatcggcggcgcaccgcttgcgctgacctacaaagccatcaacacgatggacagcatgctcggctacaaaaatgaaaagtacataaacttcgggcgcgtgcccgcaaagcttgacgatgccgcaaactacattccgagtcgtatcgcggcacttttgtgggtgctcgcggcggggttcacgggaaacagcgtcaagggcgcgtggaagatctggcggcgcgaccgccgaaatcatgcaagccccaacagcgcgcagaccgaaagcgcctgcgccggtgcgctcggcgtgcagctcgccgggcccgcatattatttcggggaatactatgataagccgacgatcggcgacccgctgcgcccggtcatgccggaggacattttgaaagccgaccgcatgatgtacgccgaaagcattttggcactcgtgctcggtctgctcgttcgcgcggcattcgtcttactgtaaagggggagaagatatggaactcacacacggcggcgactgggcgggctaccgcgcaaaattcggccacgatgcactcgatttttccgcgaatgtcagccctctcggtttgcc

SEQ ID NO: 1720 - DNA, 20775 bp, Unknown
  gut microbiota DNA sequence
agatcaccgcgggagttacttcaccgcccgttaagaaaaatgtgggcttgcccatgctgcacgcagcaacagggtcacatgcacagccgtgcgcggagacgaggttccagttctgccacggttcgtggatggcagcagaaagcaactgtacgctggaaacgcccggaatcacggtgtatccgatgtggcgttcatcgagcacgcggcacagtgcagaggcgccggaataaaacccggtgtcaccgctgtatacaagtgcgatatttttttcttttgttgtttcaagcactgataaaatctcaccgattttatacattgcgatacgattttgcgtacagaaacccggcaagttttcgagtaaacgctttgcgccgatgatgagtgtggcttcatgcaaaacttctgctccctgcgttgttacgctgtcgaatgtgccgccccctatgccgactaaagtgattttcatagcaattctctacacctttcaaggatactttcaactgtctctccgttctcccgcgggcggcgcagtacaatgaggcgtgcaccgcagtatgcgcaggcttttgctttttccataaagccgcctactgcgccgccgtcttttgtaacgagccattgaatgttgaattgttcaaggatcacgcggttgaggtcaagtgaaaacgggccctgcatggcgatgatgttgcggtgcggaatgtcgagggcttcgcacgcgcgaatgccgtcgagcgtgggcaatacacgcgggaaaagccgctttatatctagatttttaaaagcgggcaactcctttgcaccggtcgtgagcaagacattcccggcagtactttcgagatattctgccgcttctgctgccgttccaaacacgatactgttcttcggcaattcgctttcggtacggagcaatcgatggtactcgacgcctgtcgtttcacacgcttcacaaatggtgcgcgtggcttctgttgcataggggtgcgttgcgtccacacagattgacgcgccgtgcaaaagtttcgtcatctctgcggcagtgcatctacctacatgaattgtgatattttcattctcgtcttgttcttctgcgccgatctctgttgcaacactgacaagaacttctatgccgaggtttgccaaaatttttgaaaactgtctgccctctgtcgttccgctgaacaccacagctttcataccgtgcgatacccccttggcgttaccattttgccttcgatattctttgttgctttgttgcctatatatacagtcgtgaacatatcgacctgcttgttttcaagttcgcggagcgttatgatctcactttgctgcctttctctgccaatgttgcgtacgatgccgcagacagtctcctccgatttgccgttttggagcaaaatgcgaacggcacgctgtaaataatcgggccggcctttcgaggacgggttgtagattgccacgcagaaatcgcccatggcggcgcaggcaaggcgcttttcaattatctcccatggggtgagtcggtcggaaagggaaattacgcaaaaatcatgcgcaagcggtgcgcccaaaaccgcaccgccgctgagcgccgccgtaagtcccggaatgacctcgatctcgacgctcgggtaattgggtgcaagttccaaaatcgggctcgccatgccgtatacgccggcatctcccgagcagacaagcgccacggttttgccgctttgcgcggtctcaagcgcccagcggcaacggtcgatctcctttgtcatgcccgttgcgtgcacctctttttcgggataaaacgagcggataagatcgatgtagacggtgtagccgcatagtacgtcggcgttttcgagcgccgttttcgcctgtgcggtcaaaaactgcgggtcgccggggccgaggcccacgacataaacgagatttcgcttcattttacacgctccaatccggggtaaagggttttgcggcgacggcgaacgtcacgccgctgtatatatgcttttcgatcaccaattcgccgcccgacgccagcacggccgcacgggcgcagacgttgtcaatgcccgttatctgctgcacaaatgaagatgatatgaattcgccggacgcttttttgagctcctcggctgtataaaaacggatgttaaaatcatggttttgacagaattccaaaagccccggttcatcttttttgaggtctatgctcgcacacgcacagatgctttgcggtgcaaaacctgtttctttgcaaaattgtttaaatgttgcttcgatatgttcggccgatatgccgcgtttgcagccgacgccgagcacacagatttttggaacgaggtgcagcgcatcgctctgcgggtggagtgttacggaaaaatcggcttgatggttctcgtctgctgggaaaacattttcaggttgagtgcctgtgattttccactgcgaatcataataaaccactttatcggcgagcagtgtgccgctgacggttttgatacgctcaggctcgagcacgtggcagttctgcgcttttgcccactcgtctacggcgaacacgccctcgacatcggtcgcggtcgtgatgaccggcactgcgccgcagatgctcgcgagtttcttggcaaggccatttgcgccgccgaggtgaccggacaaaatcggaatggaaaaccggccgcgctcatcgagcacaatcacagcgggatcggtcgccttgcttttacaatgcggcgcaatggcgcgcacggcgatgccgacagcgccgatgaagatgagtgcatcggatttttgaaagttttcggctgtccaatcggataatttcacgccgtttttaccgccgcggctgatgctgcccggatgtgaaaaagccagtctttctgcgagttttagtccggtttcggtgaaagcgacatatgcgcagctcatgctttgctgcctttccgatattccgtcgtgaatgtgggatcgtagagcttactgcggtcgtattgtgtgccgagaaaatctccgacgacaataagtgccgttttggtgatgcccgctttatgcacgctttcggccaaatcgccgacagtacagcgcacgattctttcctccggccacgtggctttgtagacgactgccacaggagtggaagccgtataagcaccctgcaaaagcgcctgctgcacctgattgaccaaaccgattgaaaggaaaatcaccatggtcgcgccgtgtgcagcgaggctttgcagcttttcgttttccggcacgggcgtgcggccttccatgcgcgtgatgatgaccgtttgactgacagacggcaacgtatattctgcgtttaaagctgccgccgcgccgcagaagctggagacaccgggggtgtcgtcatagggaatgctttctgcatcaagcctatccatttgctcgcggattgcgccgtaaaggcacgggtcacctgtgtgcaggcgaactgttattctgttgtttttttcgttctcgcgcatgacggaaatcacatcttccagcgtcattttggcgctgttatagatcgtgcaatctgctttagcgagccccaaaagtgcagggttgacaaggctgccggcatagatgatgcagtcggcagtctgtaagagcgccgcgccacgctgcgtgatgagatccggcgcgcctgggccggcaccgacaaaatgtaccatgtttacgactccttccacttttgcagcaatttttctgcggtttcggtctgcccaagggggccggtttgattggaaaacagcaccgcgccgacttggaatgcacccgctgcgcggcgctcgaggtgcagctgcacgacgtttatcaggccgtgcatgacgggttcgcgcagaccgttttgatccaaaatatcaaggcaggcatcggttgtggccgcctgcatcagcgcttcgcacacctcttttttcgcgcccgcaagcgccgcatacgtgcagaaaagctccgtgcgacagtccgccatgcgggagtgcgtgttcataataccgcctgcgaccttcacgagcttaccgatatgcccgacgagtaaaacttcttcaaagtgctctgttgcggcggcatcgagcgcgtcaccgataaaattcgagcactttatgatgggaatatccaagagcgcggggtaggtttcacgcagataatcgaggccgtagttgccgggagtcagaatcaggcggcgcgcaccgtttttgagcgcagcctgatgaatttccagctgcatcgtatcgacgattgcctgctgactcatcggttccacgatgccgctggtgccgagcaccgaaagtccgccaatgacgccgatgtgtggattgaacgtctttttcgcggcctcttccccaccctcgatggagacgagcacggaaaagccgcctttatactcaaatgtttttgcttcttttaagagggcttcggtgatcatctcgcgcggaacgtggttgatggccgccgcgccgacgggctggtcaagcccgggcttggtcacacggccaacacccttgccgccgtcgattttaacgacgccgtgttcattgggcaaaagcgtcacatttgcgatgacgggcaagccgtccgtggcgtcaatatcgtctcctccgtcttttcgaatggcgcatacggcgccggtttcggtcttcttacagtagattggcgcgacctcaacaacgatgcctttcggtgtacgcagaccgaccgtttccggggccttgtcggtgaaaagcagtcgcgccgcaccggcggcaccgagtgccgcgcacgtgcccgttgtgtagccgcagcgcaataatttttgtccgctgcgaatgtagtgctcaaactttggcggctcctttttaccgaacaggaacgtgtattcttcggcggacattttatatagcttttgtatgttctctttttgaaacgcgtcttttacggtcatgatgtccgagacactgttcggcgaaacgcagacaacggcatcggagagcttctgcgcaaggtcaagctcgtgcaggctcagaataattgcagtattcttttcttttgcaagccgacgcagaatcgtcatgagctccgctttacctttaacgtcgagaaatgaagtcggttcgtccaaaaacagaatttccggctcctgacagactgcccgtgccaaaaggacacgctggcgctgaccgtcgctgatcttatcaaaatcgcggtcggcaatatcggctgcatttacaagatgcagcgcgtcgaaaacctgctttttatcttcttcggagaggattccgagacgaccggtatacgggtaacgcccggctgcggcgacatcaaagcaggtcgtgagctctgtgcggttcgtgtgcggcaccatcagcgccattttgcgcgcgcgggcattcggtgagtataccgaaagggactgcccatcgagcaaaacggtcccaccctgcggcgcaagctgcgcggcaagcgttttcatcagggtcgatttacccgcgccgttcgggccgataagcgtcaaaatctgtccgcgctcggcggcgaattttatatgctccaaaagcggcgaattgtagccgaccgcaaggtcattcgcttcacaatagctcatgctgccgcctcccttctctgcttgcgcacaagcagcaaaatgaccaccggtgcgccgaaaatcgccgtgacggagctgacggaaagctccgtcggcgcaaatatactgcgcgcgatgaggtcacacaaaaggcaaaatgctgcaccgcctaaaacgcaccccggcagcacgtgcaaaggctttgcactgcggagtgtgcgctttacgagatgcggcaccgcgatgccgacaaaggagatcggccccgcaaatgccgtgacgcatgccgcgagcaggctggataacaacacaagtgcgactgagaacggacgcacggaaacgccgacactctgcgcataggcttcacccatttggtacgccgccatcggtttggaaagcataaacgaaagcgcaaggcatggcaacacaattaaagccgccgtgaggacattctcccacgtcatgccggaaaagcttcccatcgaccagttgtgtagattcacgatattggaatcctgcgcaaatgcaacaacaatatccgtgacagccgaacagatatagctaatcatcacgccacagataacaagcacgcctgcgcgctttacgcgctgtgaaacagccaagacgaagcccatagcgaccatggcaccgacaaatgacgctaaaatcagcgtgagtgagcttgtgaacaaaccgtgatttaaaagcacgaccatcgtgagtgcaacggcgagctttgcgccgccggaaacacccataacgaacggcccggcgatagggtttgcaaaaaaagtctgcaataagtaacccgcaacggacagcgccgcaccgagcaaaacgtccatggcggcacgcggcaggcgtaaaccaaatatgatcttttgcgcgagtgcgttattccccgcgctgaaaagcgtgcttaaaatgtccttcggcgaaagggccgtgctgccgcagaaaatgttcagcataaacagcgcgagcaatgcagccgtgagcgcaagatatgaaattgtcagacgctttgtgccgttttgtttcatggtttcctcagcttacatgtgtcagaaatttcagttcatcttcgttgaccgcattcgggctttccgccgtgaacacgcggttcatgtccaaaatcaaatcgggcagctccatgctttcctgaaacaggctttgcgtggtacaccagacgttgccgttctgcacggctttgaaatctgccagcatgggacattttgataagagctgctcggttgtttcaatcttgccctcgatggtgctgttgtagattaaaacatctgcatctttcgcgccggcgtagaactcctcgagcgaaagattgattgttgcgaggttattgccgttatcggaaagatcggaaaaaacgtattcgccgcccgccatgccaatcatcttcgcaacgtaatcgttcgatttacgcaccgtgacaaggttattcgacgtcacagagaaaaacgctgccgttttgcctgtggtatcctgccccaaaagcggccggatgcgctgaacctgctcgttgaagaacgtttcggcttctgcctctttatcaaataaaatgccatagagcttcacccactccatgcgtgccaaggggtcggattcataactggagcgctcaacaagcacgggaatgccaaacttttcaagctgctctttcacttccggcgtgtggtagatcattgtgttttcaatcgcgaggccgcagtttgcagacacgatgcgctcgtaatccggcgcgctgtacttacccgcgtaggaaatttcaccgttttccatggcttctttcgcttccggcagataccagttttcggcgcttgtgccggaaagcgtgacggcgcttcgtgcatcgagcttcaggatcggatccatcgcagacgtggagacgagatagacattttcaagcggtttctgcaaaacggcgatgtcttccgaaagaccgttcggcacggtactgttttccggcacgacgaggtagcgggcattctgaatggtgatgagccttgtaccgccggtgcactcgtccacggtgaactctttcgcgtattcgagcggataggcgctttcgacttgaaaatctgcttgtgtttcatcggcctgcgctgggcttgatgtactctcaggctgtgccgggtttgctgcgcagcccgtgaaagccagaagcaaaagcgccgctaaaagcgctgtaagccgtctcatgcggtaagagacgcgctgtcaaacgtcagggtgtattcgatctcgtgcggagtgctcatggccgtggtatctgccgtaacggcgagtgcggtatcgagtgcggcgacgggaatttcaaacacggagttgccttcggtattgacgggcagatacttttcgccgtccacgatcatataatcgtagtttgggctgctccatgtgatcttcgcggtcattttgccgtccgcaacggtgagctccgtggggctctcgattgttgcacggccggaaccgccctcaagcgtgacgttgcacgtatacgtgccgtcctccggcacttcggtctctgcgtcgcttgcggtgtcctcaacgatcggctgcgggtcacgcacgctgaccttgtggtcgtaccacgtgcccttcgtgccgatgagcgcaaggtcaaaatctttatcgacacttttcagcgggatgtcaaagccgtagacttcttccgatgtgccgtctttataggtgacggtatcggtggtcggctgaagccattcgctttcgttctgctttgcgtcctctgccgtaccgaggtacagatttaagatcttcttagaacgcaggctgacgtggaacgtcatctcgccgttttcaactgtcagcgtacccatgccctcgcaagtttcgttcgcctgaaacatagagctgtccgttttgaactctgccgtgtacacgccgtcttccggcacaacgtccggctcttcggtgggggtgggctctgcgcttgaaacggaagttttagaaggcgcactgctttcattcgtattgcctgcgcacgcgctgcacccgaagatcaggagcgctgagagcaaaagggctgtaatctgcttctttttcattttattatacctcttctttattttaaaaacaatctataaacataagcgcccgaagagcgattctctccgggcgctgtgtttacggattagccattcagggaatcgatcgctgcctgcgcgtggtcgatgtagagctgctgaatatccccaatctcaccgagaccagcaatctgcgtatcaacgctgtcgaagcagtccgcagccttgaactggctcaaccaggaatcttcatcgtcgccagccatatcgttgttggcatggtcacctgcaacgaccatcagcggacggagcacaaccttcgtaaagcctgcttcctttaccttttcgataacggcttcgcaggaggtgtcttccggctcaccctcaacggtgccgacgaatacgttcgtgtagccgagtgtttccatggtagtctgcatctggctgtaactgacctttgcaacatgcgccgtaccgtggcccataaagacgaatgcggtaccgtcttctgcagcagcagcgacgtcatcataaccggcggttttcacagcttcagctgtgatggcctttgcaacagcttccttatccgcgttgataaccgttgcgtcgtcgcccacttcgccgagcagcggctctgcaacagcgatgctctcaaacttatccttataccggtcaagcaactcgttcatctcgtcgtattctgcgccgtgcatgagatgcgtcggctgcacaacgaggttcttgacaccatttgcaacagcgcgatcaagcgcctgctgcatgttatcgatcttctcatcatcacgcgcctgcacgtggttgatgatgatctgagcggtgaacgcgcggcggacagaccaatccgggtaggcttcctgcagagcgtcctcaatgcccttgatatcctttacgcgactgtcgttgaaggacgtaccgaagctgacaacgagcagctcgttttcgccgatttcgtcttcgttgcgcgggtcgtcttttgcagcgtcgcccgtatcgcggccgaagtaatccgggtcggcgttatcgccttccacaagctccttctgcgcatcggtcagcgcgtcccaagcttcttttgctgctttgcattcttcatcggtattatcattgcgctcctgcacatagattgcatcgatgagatccgcaacattcttcgctgccatttcgtctgtttcctcctcggttgcgctcgccgcgctgcttttctctgcggagctctcgctgctttcaactgtggaagaagtgctgctctcctcagaagatgcgctcgaagacgcgttattgccgcagcctgcggcagcggtcgtgagcattgtaactgccattaccagtgcggcagtctttttccatgtaagcttactcatggggtgtgcttcctttctgtggtcaatatcaacccttattgtattttcactgaaagaagggtacaggaaactaaggtatatatgaattttctttcaaatacaccataaagcccatgagaaaagccgaggtcctttgtgctgccgaaacgtacagaatgtatagaacggcaacacaaaaagaccccggcgtatagtcagagcattttcggtacaaccaattcctcgtgatttggagtgtgacactcccgtaccaacacacaggcaggtttcccggctgaaagatcgtcatctgccgccgccttcccaagctatgctcagtgaccggcaaaacgccatggcggcaaactcccttatcacggtgacgagatcgtgcgggatttacacccgcttcccttttacccttttctatgcgcttttaaaagcacacgaaaggcacctgttgttttcattcagttttcgcagtacagtatagcacaggaaattcaaaaaagcaagataatccgccgttttttgccttgtatgcaaatctgcccgaaacttaagtaaaatatcttgctattttatgcgaaacgtgtataatatataaaaatggatgcgtaaattgccgagtggcggcgatttacttttatcggggaggaattgaatttggtcaaagttgcaatgatcggcgtcggcgccatcagcggcatttaccttaaaaacatcacgacggtgtttaaagaggtggaactcgtcggcgtatgcgacctcatcccggagcgcgcggaaaaaggcgtgcagacggtgaaggaatatattgaagcaggcgcaaaagcccccgtgccgaaaatttataaggatatgtatgaagcgttcaacgatcccgaagtggaggttgttctgaaccttacccgcccgtatgagcactatggcgtgacgaaagccgcgctggagcacggcaagcatgtgttctccgaaaagccgcttgcggcggacatggaagaaggcgacgagcttgtcgccctcgctgaagaaaagggccttttgatgggcggcgcgccggatacattcatgggcgcgggcattcagaccgtgcgcaagcttgtcgatgacgggtacatcggcgacattgttgcggcgaactgcgcgatgatctgccatggccacgagacatggcacccggacccggagttctattataagcgcgcaggcggcccgatgatggacatgggcccgtattacgtgacggcactcgtgcagctcatcggcgaagcgaagggcgtcatcggcatgacgaaaaagacgtttccggagcgcatcatcacgtccaagccgcactacggcgagaaaatcgacgtcgatatcgacacgcatctgacgggcagcattgcgtttgcaaacggcgcggtggcgcagatttgcacaacatttgatgtgcattacgcacccggcgcacagtgccgctttgagctgtacggcacaaagggcaccatctgtgtgccggacccaaacacgttcggcggaccggtgctcgtataccgcccggaggatcaggtaagcgggcaggcgatcgaccccggcctgatggcgcacaacgcgccgcagtattacaccggctacaaagaagtgccgctgctgttcgactacaacgaaaactcccgtgcgctgggcctcagcgatatgtgcaaggcgctgcgcaccggccgtgatttccgcgcgaactaccaacagcagcaccacgtgctggagatcttgacgagctttgaaaaatccagtcgcgagggcagatatatcccgctgaaaacacactacacgcgcacggcaccgatgcagaacaacccgatgcacggcattttagacgactgatatggaggcaatacgattatgaaagcagcatatacaggttggacttggctgaccgccaaggacgctgagaccgccaaaaagcaattggagcagtcttttaaggaatgcaagttcctcggctatgactatgtggaaaacttcgcctttatcggcgattattttgaagacccgaacgagctcatcgagatggaaaagcgctgcggcgtggagcttgtgaacctgtacggtcactttggcaccgacgtggaagaaaacatcaaggtcggcaaaaagcagatcgattttcttgcagccatcggcggcaagtggtacaactgccagcacggcgggtatttcggtgacggcggtccgctggagcgcccgacaaaccccgaggtgctcgataaaatctgcgccattgcggacacactcggcgcttacgcaaaggaaaagggcgtgacactgtgcttccacccgcactacggcacatgcgtgttctgggaaagcgacattgattatttgatggcacacaccgatccgcgttatgtttcgttctgcatcgatacggcacacacaacgcttgcgggcatgtcccccgtcgagcttatcaagaaggtcggcccgcgccttgcgtacatgcacctcaaagacgtagacacctacgctttgaagaccgcagagggtgcagacaaaatgggtacattccgcgcgctcggccacggcaccatcgacttccctgctgtgaaagcagcgcttgaggagatcggctacgacggcattttgtgcgtggaactcgaccgaccggaggtcggcaacttccattcggcagaggtctccagaatttacattcgagacgtgctggacatttaagtttatttaggagtgaattttatggcaaacacaaatcccgtaaaggttgcaatgatcggcgtcggcgccatcagcggcatttaccttaaaaatatcacgaacgtatttaaagaggtggaactcgtcggcgtatgcgacctcatcccggagcgcgcggaaaagggcgtacagacggtaaaggaatacattgaagcaggcgcaaaagcccccgtaccgaaaatttataaggatatgtatgaagcgttcaacgatcccgaagtggaggttgttctgaaccttactcgcccgtatgagcactatggcgtgacgaaagccgcactggagcacggcaagcatgtgttctccgaaaagccgcttgcggcggacatggaggaaggcacagagctgatggcgctcgcaaaggagaaaaatctcctcatgggcggcgcaccggatacgttcatgggcgcaggcatccagaccgcacgcaaggttattgatgacgggctgatcggcgatgtcatcggtgcgacatgcgcaatgattcagcacggccccgagacatggcatccggacccggatttcctctataaaagaggcggcggtccaatgatggacatgggcccgtattacgtgacggcgctcgtgcagctcatcggcgaggcagtcggtgtaacggctgtgacgaaaaagtcgtttaaagagcgtctgatcacctctgagccgcactacggccaaaagatcgacgtggaggccgatacgtacctcaccggtaacatcacgttcgcgaacggcgccattgcgcaggtgttcacgacgtttgacgtgtactatccctcgcagaactacgcacgctttgaaatttacggcacgaagggcacgatgatcgtgccggatccgaacacgttcggcggcccggtacttttgatgcgccccgaagacgtggaagcaacgcactccgatcccggtctgcgcacaggcaatctgcccgcttacgccggctacaaggagattcctctgctgttcgactacaacgtgaactcccgcgcgctcggcctcagcgacatgtgcaaggcgctgcgcaccggccgcgatttccgcgcgaactgccagcagcagtatcatgtgctggagattttgacgagctttgaaaaatccagtcgcgagggcaaattcatcccgctgacgacgcattacacgcgcaccgcgccgatgaaaaacaacccgatgcacggcatcttggacgactaaaatcgcataaaagcacagcccgcagcttgggttttcctgctgcgggctgtttgttgtttatttatagtgttttcagctcgtctgaaaattgccgaaaggcggtaggcagtgcgaaatcgcgctcaagttccgcaaggcttgcccatgtaaacgcttcggacatcgcgttgcagcggatcacatagccggtcatctcccagcgaatatgcgtgaaaatatgcgtcttgtgcgtttcgagcatcagctccttcgggtcggtgtgaaagctctgcgctgtttgcacggcggtttgggcatcgagcctttgaggtacgttcggaaactgccataacccggcaagcaaacccgtctcgcttcgcttttccacggcgaatctgccgttgcattcgagcaaaagcacggtgcgctcttctgttttctttgcggctttcggacgttttacagggtattttgtgacgtttccggctttatatgcacggcaaaagctctgcgtgggacagacttcgcacttggggcttttcggcgtacagacacacgcgccgagctccatgagtgcttgcgtgaatgcgccgcagtgcccttttgggtagactctgcaaagcgcctctcctatctcttttttcacctgcggcaggtcgatcgggcggtcgtccgccgtcatgcgcatgattatgcgcagcacgttgccatccacagccgctgcgggctgctcaaagcaaatggacgccactgcgcccgccgtatacgcgccgatgcccggcagcttttcgagcgcttcggcggtatcgggaaaagcgccgttttgcgtttcggtgaggagctttgccgttttctgcaaatttcgtgcgcgggagtaatagccgagtccttcccagagttttaacacgcgggcttcgtcggcttctgcaagtgcctgtactgtgggaaacgcttccataaagcgctcgtaatacccgatgacggcttccacacgcgtttgctggagcatgatctccgaaacccacacgcggtacggctccttcgtgtaccgccaaggcaggtcgcgcgcgtttttctcgtaccacggcagcaaaacgcccggcagcgcagcgtaaatttcgttttgttccatactatcccctttttccactcttttgatcttgggtttacagtatagcacacccgctctaaaaaaggaagcggtattgcatggaaacggcagatgcggtataatcggtattgtcttgactttcccgcttaagttttgtatactttacaaagcatactgaatttataggcaatatgaagacaaacgctaaggagcgaagaaatatgttgaaccaattttccagaacggagctgatctatggccgtgacgccatggagatgctgaaggatgcgcgcgtagccgttttcggcatcggcggcgtgggcggctacacggtagaggcgcttgcgcgcagcggtgtgggctcgctcgacctcatcgacgacgataaggtctgcctgacaaacatcaaccgccaaatctacgcgacgcgcaagacggtcggtcagtacaaggtggatgttgcggccgagcgcattaaagacatcaacccggacgccgtggtgcgcacatacaagacattctacacgcccgaaacggccgaccagtttgattttaaacactacgattatattgtggacgccattgacacggtgacaggcaagattgcgcttgtgatgaatgcaaaagcggcgaaaacgccgatcatctgctccatgggtgctggcaacaaggtagacccgaccgcgtttgaagtgacagacctatacaagacctccgtttgtccgctggcgaaggttatgcgcaacgagctgaaaaagcgcggtgtgcgcaagctgaaagtggtttactccaaagagctgcccatcacacccgtggacgacatggccataagctgccgcacgcactgcatctgcccgccgggcaccgagagaaagtgcacgcagcgccgccaggtgccgggcagcaacgcttttgtgccgtccgttgtgggactcatcatcgcgggcgaagtcatcaaagatctgaccggcttcaaaggccgcggcatcggcgcataatctacttggattacgccgcaaatgcgcctgctccgtggccccccttccgcgcggtgtatgccgtgagctgcgaccgtaaaaacgcgctgaactcttggcgcatccgtttaagacatccgatgaccgaggatgaactcgatgaatttgagaagatcttcgacaagctatatttggagtttacataaaatggaaagagaacttgaaccctaccagcgcgttgagcgcagtatacaaaagaaattccgcaagtcaatctgggtgccgttcatcgctgcggtaaagcgttacgagctcattcaggaaaacgacaagattgcggtgtgcatctccggcggcaaggattccatgctgatggcaaagcttttgcaggagttgcaaaaatacagcgaagttccgtttgagcttgtgtaccttgtgatggacccgggctacaatgagctgaaccgtaagaaaatcgaaagcaatgcagcattactgcacattccgatcacgatttttgagaccgatattttttccgtggcaaacaacaccgaaaagaacccgtgctatttgtgtgcaaaaatgcgccgcggacatttatacagcaaagcgaagtcgctcggctgcaacaagatcgcacttggacatcatttcagtgacgttgtggaaaccactgtgatgagcatgttttacggtgcgcaattacaggcgatgccaccaaagctgcacagccggaattttgaaggtatggagctcattcgccccatgtattgcatccacgaagacgatattttatcatggaaaagatacaacgatttggagtttatccagtgtgcatgccgctttacggaaaactgcgcaacgtgtgacaatgacgtaagcgtctctaagcggcaggaaacaaagcttttattgcgccgcttaaaacgcgataatccgaatatagaaaagagtattttcaacagcatccattccgtttgtctcgacacgatggtcggatataaatcacgcggtgtgacacacacgttcaccgagatctacaacacccgcacggaagaactgaaaaaagaatcaaaagaagacgaataacacaaagggcgaacagcggaaatctccggctgctcgccattcgttacagcaaaagaattaggcgttgctaatcctcaggagatttaatttactttatgtagttgacagtgcgttttagttgtgctatcctctattttagttgaacatacaaccaaacgcttttatctgaaacggaggcacagctctatggacaacacagagcgccagataaccaaaatcgcccgtgaagcaaatcggtttacggtgcagacgatgaaagaagacggcataggcacagcggaaatggatgtgatccactttgtacggcataaccccggcacaacacaaaaagaaatgtgggaagcgctgaagatcgacaagggcgcaacggcgcgtcgcgtggcgcggctggaggaaaagggctacctcacccgcgagccgaatcctctggacggcagaagtcagctgctctaccccactgaaaaagccgaagcgctccgcaactccaaggcggaaattgagggttcgttttacgagtggctgctcgacggcctgcctgacgacgaaaaagaggtgttctgcaaaacactgaacaccctctatttaaaatccaaggaagaacgccgcgcaggttttctgcatgtcgcgcagcgcgtaaaagagaaagaggcacaaaatgaagacaaataggaagtctgcggagtttcaaccgaatcgtgtcctctcttactttaaggcagagtggggagcactgctgattgtcacagtctccggcctgatctacaatatcggtcttttgaccggaccgtggtttgagggcacgatgaccgggtaccttgtagagattttaaacggtaccggacagttttccggtatgctgatgctcgtcatcagctttgcggtcgtcacggcggtcgtgcagatctcacgctacgtgaagcgcttttacgtacgccgctttgcaaacaatgtgaatcgccgcatgaaagaaactttgtacggcagccttgtgaaaaaaagccgtgcaagtttgcgcgaagaaggcgaaggcaatatcatgacgaaggccattcttgacgtagacgactgcgtggagggtatgcgcaaattcacgaccgagattttcgacaccggcgtggcgctgacagcatacctctgcatgctgctgtggtatgattggcgtttgactattttgtgcatgcttttcccgccgatctcgtatgttacggcggaaaagatgaaaaaagtcattcaaaaagccggcgcggcgtacaaggagcaatccggccggctgagcaccgctactctggaccgtgcagaaaacgccatgacctaccgcgttttcggtcttgaaaaaaagcgtcaggccgtatacgaagaaaacctgacgagctatgaaaaagcagccgtgaaagcgaacatctggaacgctgccatgccgccgatctaccgcatcatctctatggcgggcgtgttcttcattttgtatttcggtcagaagaatgtgcttggtaccggctggcaggcatggagtattgcttcgtttacaacgttccttgtatgctttgtaaagctttccgtaaaatcctccagcgccgcaaagctctttaacgcggtgcataaggcgcaggtctcttggaaccgcatcaagcccctgctaccgcaggaagaggaaaacgaggccgatgaagtcaaagtaaagaaaacgcccgttgaggcgctcaaggtcaagcacctgagctttacatacccggacggcaagaaaattctcgacgatatttcgttctcggcgaaaaagggccagatcatcggcatcaccggcgcagtcgcatgcggcaaatcaacgctcggcaaggcgtttttgtgcgaatatccgtacgaaggccacatcacagtggacggcgcagagctgcaaaacatggagcaaagcgtgcgcacgggcatcgtcggctaccttggacacgacccggagctctttaacgacagcgtggaaaacaacgttctgctcggcgacagcaaaaacagcgatacgtatttaaatgctgcgtgcatgaagcaggaggtcgcggaaatgaccgacggcaaaaatacgctcatcggcagcggcggcgcgtacctttccggcggtcaggcaaagcgccttgcgtttgcccgcacgctgtgccacgataagccgatcctcattctggacgatccgttctccgcgctcgataagaacacggaaaagcaggcgttcgtcaatttgcaagcgctcgcaaaagacagcatcgtgcttttgatttcgcacaggctatacctcttcccggagatggacggcgtgatctggatggaaaacggcaaggccgtgaccggcacacacgaagagctgctgaaaactgtccccgaatacgaaagcctgtatacatcgcaagtccataccgcagagaacggaggtgccgaacatgacgcgcaaaaaacaagtgagaacggtgatctttgacaccgtaaaaaggcaaaaaggcctttccctcggcattgtttcggccgttatcggcgctgttgtgttcgcacttatcccgccgctgatcttagccgatattgtggactccatcacagccggaaccgacgccgcattcgcacgtatcctactgtatttcgccacgctggcgctcaccgggttcacagaatccgcgcgtgaaagtctgctcgtggtattcggccagaaaatcacccacgcgctacgcagcagcttaatggacaaatttacacaccttaccgccgataacattacaaaacaggagcccggcacgctcgtttcccgctttgtcggcgatgtcgataccgttgaaaccctattctcctccggcatcatcagtatgttcgccgatgcgtgcagaatcatcagtattctggtcgttatctggttccaaaaccgtggtctggcgatcgtattgctcgttttgctgccgttcctgttctgcttcacgcgccacgtgcagaaaaatatgctggcagcgcagatcgaaaaccgcaaggccgtgggccgcgcttcgggccacgtgccggaaacactgcacaacatccgcaccattcactgcctcggcaaagagaagtatatggaaaagcgctatgacacgtacatcaatgagagctaccgcgctatggaaaagacgaacttctatgatgccgtctactcccccgttatcctcattacgaacgcagtggtcgtcgccgtcgtcatgctgctttccgcttccggcaacaccaccgtgctgacgttgttcggtatgtccgccggtacggctgttgccgttatcaactacatttcacagatcttcacgccggttgaaagccttggcatggagattcagaccatccagtccgcgttggcgggcatccaccgcatcaacgagttcttcgcgctggaagaaaatcccgataccgtaccgacacatgagccaaagaccatcaccgcaagaagcggaagcgtgccgtttgtcgagttccgcgatgtcacgttcggctacgataagcgcgtggtgctggatcacttgagctttaaagtcatggacggtgatcaggtcacgctgaccggccgcaccggcgccggcaagagtaccatcttcaagcttctgctcggtctttataagccgcagagcggcgaggtgctcattcacggcgtgccggcggccgatatccgcgatgatgaacgccgccgtctgttcgg

SEQ ID NO: 1721 - DNA, 1276 bp, Unknown
  gut microbiota DNA sequence
atgtccccattgcggagcttttccgcctgttgcgcccacgcagtgagcatttcggatagctcggcggcatcccttcccttccgagggtcaacacgcagagaaacgccgttctcaccggtttccaccgtcaggccgtagcgatcctccaaggtaaacagggtgtgcatcaggccgagatagctgtcaatgtccggcacggacagcgccagcggtgagacacccagcgcaccggcaaggctctccgtcagctccgccttgggcgttctgctgccggattcatactgcgccatacggatgtcagcggtcttttccgggaaaccgaccacctgccccaagtatttttgcgtcattccccgcagattgcggaagaaccgaattctctcaccgattgccatagcgattacgctcctcgttttgatactgtgcgatcagtatagcatatatcgttagcgttcgtcaagatagcagaagcaaaaaagtttaattttttcccttgatgctattgactttacggaatatgcttagtataacagctatagcaaatagcgttaagctctttgcaaacaactgaatatccgtcgtgcgtcacggtaatggcgtacccgctcgggcaaatcggaatgcggtcagaaagttctccgacactaaataagagaactataaccatacgaaaggggtgatgaaatggaaaacacaagctttatgagagtggaggaagtagcgcaggaattgggcatttccaaatcctacgcctacaagatcgtccagaagctgaatgaggaactgaaaagcaaaggcttcctcacgatttcgggacgagtcaacaagcaatattttatggaacgcacctgttacggtgctgttcagaaagagaggtaaaaatgtccgtttataaagataccaaaaacaacacttggaaggtctactatcgcttcacggattggcagggcaaagtccaccagtctacgaagcgaggctttccaaccaaacgagaagctcttgcttgggagcgggaacagctccacaaagtggaagccgatctggatatgacctttgagagctttatcgacacctacacagccgatatgaagaaccggctgaaagagaacacttggcacaccaaggagcatatcatccgcaccaaactgcttccctacttcgccaagcggaaaatgaactcgatccagcccaaagacattatcgcttggcaaaatgagatgatcaaatgtcgggataagagcggcgaggcatattcgccggtatatctcaaaactct
